(19) United States
(12) Patent Application Publication
(10) Pub. No.: US 2023/0383294 A1
(43) Pub. Date: Nov. 30, 2023

(54) NOVEL RNA COMPOSITIONS AND METHODS FOR INHIBITING ANGPTL3

(71) Applicant: SANOFI, Paris (FR)

(72) Inventors: Bodo BRUNNER, Frankfurt am Main (DE); Mike HELMS, Frankfurt am Main (DE); Armin HOFMEISTER, Frankfurt am Main (DE); Kerstin JAHN-HOFMANN, Frankfurt am Main (DE); Christiane METZ-WEIDMANN, Frankfurt am Main (DE); Sabine SCHEIDLER, Frankfurt am Main (DE); Pierrick RIVAL, Paris (FR)

(21) Appl. No.: 18/248,982

(22) PCT Filed: Oct. 15, 2021
(86) PCT No.: PCT/EP21/78570

§ 371 Date: Apr. 13, 2023

(30) Foreign Application Priority Data
Oct. 16, 2020 (EP) 20306223.7

(51) Int. Cl. C12N 15/113

(52) U.S. Cl. CPC C12N 15/113; C12N 2310/14; C12N 2310/351; C12N 2310/315; C12N 2310/321

(57) ABSTRACT

The present disclosure relates to dsRNAs targeting ANGPTL3, methods of inhibiting ANGPTL3 gene expression, and methods of treating one or more conditions associated with ANGPTL3 gene expression.

### SEQUENCE LISTING

[0001] Nucleic acid sequences are disclosed in the present specification that serve as references. The same sequences are also presented in a sequence listing formatted according to standard requirements for the purpose of patent matters. In case of any sequence discrepancy with the standard sequence listing, the sequences described in the present specification shall be the reference.

### FIELD OF THE INVENTION

[0002] The present disclosure relates to dsRNAs targeting ANGPTL3, methods of inhibiting ANGPTL3 gene expression, and methods of treating one or more conditions associated with ANGPTL3 gene expression.

### BACKGROUND OF THE INVENTION

[0003] Angiopoietin-like protein 3 (ANGPTL3) is an ANGPTL family member believed to be involved in lipid and glucose metabolism and angiogenesis. ANGPTL3, also known as angiopoietin 5, ANGPT5, FHBL2, and ANL3, is a 54 kDa hepatic secretory protein regulating plasma lipid levels, including levels of plasma triglycerides (TGs), very low density lipoproteins (VLDL), low density lipoproteins (LDL), and high density lipoproteins (HDL). ANGPTL3 inhibits lipoprotein lipase and endothelial lipase mediated hydrolysis of TGs and phospholipids (Tikka et al., Endocrine (2016) 52(2):187-93). Elevated levels of plasma triglycerides (e.g., 150 mg/dL or higher) and LDL (e.g., 130 mg/dL or higher), as well as diminished levels of HDL (e.g., 60 mg/dL or lower) significantly increase the risk of cardiovascular conditions such as heart disease, heart attack, stroke, and atherosclerosis, e.g., by contributing to risk factors such as obesity, hypertension, high cholesterol levels, high blood sugar, diabetes and metabolic syndrome. Very high levels of plasma triglycerides (e.g., 500 mg/dL or higher) significantly increase the risk of pancreatitis.

[0004] WO2012/177784 discloses angiopoietin-like (ANGPTL3) RNA compositions and methods of use thereof.

[0005] Double-stranded RNA molecules (dsRNAs) have been shown to block gene expression in a highly conserved regulatory mechanism known as RNA interference (RNAi). This appears to be a different mechanism of action from that of single-stranded oligonucleotides such as antisense oligonucleotides, antimiRs, and antagomiRs. In RNA interference technology, double-stranded RNAs, such as small interfering RNAs (siRNAs), bind to the RNA-induced silencing complex (“RISC”), where one strand (the “passenger strand” or “sense strand”) is displaced and the remaining strand (the “guide strand” or “antisense strand”) cooperates with RISC to bind a complementary RNA (the target RNA). Once bound, the target RNA is cleaved by RNA endonuclease Argonaute (AGO) in RISC and then further degraded by RNA exonucleases. RNAi has now been used to develop a new class of therapeutic agents for treating disorders caused by the aberrant or unwanted expression of a gene.

[0006] Due to the importance of ANGPTL3 in regulating triglyceride and lipid metabolism, and the prevalence of diseases associated with elevated triglyceride and LDL levels, there is a continuing need to identify inhibitors of ANGPTL3 expression and to test such inhibitors for efficacy and unwanted side effects such as cytotoxicity.

### SUMMARY OF THE INVENTION

[0007] Provided herein are dsRNAs useful for inhibiting expression of an ANGPTL3 gene. The dsRNAs provided herein may reduce elevated triglyceride, VLDL and/or LDL levels into normal ranges, or maintain normal triglyceride levels, resulting in overall improved health. The RNA agents of the present disclosure may be used to treat conditions such as lipid metabolism disorders characterized in whole or in part by elevated TG and/or LDL cholesterol (LDL-c) levels (e.g., hypertriglyceridemia, and hyperlipidemia such as familial combined hyperlipidemia, familial hypercholesterolemia (e.g., homozygous familial hypercholesterolemia or HoFH), and polygenic hypercholesterolemia). The RNA agents of the present disclosure also can be used to lower cardiovascular risks (e.g., atherosclerosis, arteriosclerosis, heart disease, heart attack, and stroke) in patients who have elevated TG and LDL-c levels.

[0008] Accordingly, provided herein is a double-stranded ribonucleic acid (dsRNA) that inhibits expression of a human angiopoietin-like protein 3 (ANGPTL3) gene by targeting a target sequence on an RNA transcript of the ANGPTL3 gene, wherein the dsRNA comprises a sense strand comprising a sense sequence, and an antisense strand comprising an antisense sequence, wherein the sense sequence is at least 90% identical to the target sequence, and wherein the target sequence is nucleotides 135-153, 143-161, 143-163, 144-162, 145-163, 150-168, 151-169, 1528-1546, 1530-1548, 1532-1550, 1533-1551, 1535-1553, 1602-1620, 2612-2630, or 2773-2791 of SEQ ID NO: 1181. In some embodiments, the sense strand and antisense strand of the present dsRNA are complementary to each other over a region of 15-25 contiguous nucleotides. In some embodiments, the sense strand and the antisense strand are no more than 30 nucleotides in length.

[0009] In some embodiments, the target sequence of the present dsRNA is nucleotides 135-153, 143-161, 143-163, 144-162, 145-163, 150-168, 151-169, 1528-1546, 1530-1548, 1532-1550, 1533-1551, 1535-1553, 1602-1620, 2612-2630, or 2773-2791 of SEQ ID NO: 1181. In further embodiments, the target sequence is nucleotides 135-153, 143-161, 144-162, 145-163, 150-168, or 1535-1553 of SEQ ID NO: 1181. In further embodiments, the target sequence is nucleotides 143-161, 1535-1553 and 135-153. As used herein, a target sequence defined as the range “x-y” of SEQ ID NO: Z consists of the target sequence beginning at the nucleotide in position x and ending at the nucleotide in position y of the nucleic acid sequence of SEQ ID NO: Z. Illustratively, for the sake of clarity, the target sequence defined as the range “135-153” consists of the target sequence beginning at the nucleotide in position 135 and ending at the nucleotide in position 153 of the nucleic acid sequence of SEQ ID NO: 1181.

[0010] In some embodiments, the dsRNA comprises an antisense sequence that is at least 90% identical to a nucleotide sequence selected from the group consisting of SEQ ID NOs: 227-229, 261-265, 269, 343, 356, 379, 385, 386, and 426.

[0011] In some embodiments, the sense sequence and the antisense sequence of the present dsRNA are complementary, wherein a) the sense sequence comprises a nucleotide sequence selected from the group consisting of SEQ ID NOs: 13-15, 47-51, 55, 129, 142, 165, 171, 172, and 212; or b) the antisense sequence comprises a nucleotide sequence selected from the group consisting of SEQ ID NOs: 227-229, 261-265, 269, 343, 356, 379, 385, 386, and 426.

[0012] In some embodiments, the sense strand and antisense strand of the dsRNA respectively comprise the nucleotide sequences of: a) SEQ ID NOs: 13 (sense strand) and 227 (antisense strand); b) SEQ ID NOs: 14 and 228; c) SEQ ID NOs: 15 and 229; d) SEQ ID NOs: 47 and 261; e) SEQ ID NOs: 48 and 262; f) SEQ ID NOs: 49 and 263; g) SEQ ID NOs: 50 and 264; h) SEQ ID NOs: 51 and 265; i) SEQ ID NOs: 55 and 269; j) SEQ ID NOs: 129 and 343; k) SEQ ID NOs: 142 and 356; 1) SEQ ID NOs: 165 and 379; m) SEQ ID NOs: 171 and 385; n) SEQ ID NOs: 172 and 386; or o) SEQ ID NOs: 212 and 426. In some embodiments, the sense strand and antisense strand of the dsRNA respectively comprise the nucleotide sequences of: a) SEQ ID NOs: 13 and 227; b) SEQ ID NOs: 14 and 228; c) SEQ ID NOs: 15 and 229; d) SEQ ID NOs: 51 and 265; e) SEQ ID NOs: 165 and 379; or f) SEQ ID NOs: 171 and 385.

[0013] In some embodiments, the dsRNA comprises one or more modified nucleotides, wherein at least one of the one or more modified nucleotides is 2′-deoxy-2′-fluoro-ribonucleotide, 2′-deoxyribonucleotide, or 2′-O-methyl-ribonucleotide. In further embodiments, the dsRNA comprises two or more 2′-O-methyl-ribonucleotides and two or more 2′-deoxy-2′-fluoro-ribonucleotides (e.g., in an alternating pattern). In some embodiments, the sense sequence and the antisense sequence comprise alternating 2′-O-methyl ribonucleotides and 2′-deoxy-2′-fluoro ribonucleotides.

[0014] In some embodiments, the dsRNA comprises an inverted 2′-deoxyribonucleotide at the 3′-end of its sense or antisense strand.

[0015] In some embodiments, one or both of the sense strand and the antisense strand of the present dsRNA further comprise a) a 5′ overhang comprising one or more nucleotides; and/or b) a 3′ overhang comprising one or more nucleotides. In further embodiments, an overhang in the dsRNA comprises two or three nucleotides. In certain embodiments, an overhang in the dsRNA comprises one or more thymines.

[0016] In some embodiments, the sense strand comprises a nucleotide sequence selected from the group consisting of SEQ ID NOs: 441-443, 475-479, 483, 557, 570, 593, 599, 600, and 640; and/or the antisense strand comprises a nucleotide sequence selected from the group consisting of SEQ ID NOs: 655-657, 689-693, 697, 771, 784, 807, 813, 814, and 854. In further embodiments, the sense strand and antisense strand of the dsRNA respectively comprise the nucleotide sequences of: a) SEQ ID NOs: 441 and 655; b) SEQ ID NOs: 442 and 656; c) SEQ ID NOs: 443 and 657; d) SEQ ID NOs: 475 and 689; e) SEQ ID NOs: 476 and 690; f) SEQ ID NOs: 477 and 691; g) SEQ ID NOs: 478 and 692; h) SEQ ID NOs: 479 and 693; i) SEQ ID NOs: 483 and 697; j) SEQ ID NOs: 557 and 771; k) SEQ ID NOs: 570 and 784; 1) SEQ ID NOs: 593 and 807; m) SEQ ID NOs: 599 and 813; n) SEQ ID NOs: 600 and 814; or o) SEQ ID NOs: 640 and 854.

[0017] In some embodiments, the dsRNA is conjugated to one or more ligands with or without a linker (e.g., one or more N-acetylgalactosamine (GalNAc). In some embodiments, the ligand is N-acetylgalactosamine (GalNAc) and the dsRNA is conjugated to one or more GalNAc. In some embodiments, the dsRNA is a small interfering RNA (siRNA).

[0018] In some embodiments, one or both strands of the dsRNA comprise one or more compounds having the structure of

[chemical structure]

[0019] wherein:
[0020] B is a heterocyclic nucleobase,
[0021] one of L1 and L2 is an internucleoside linking group linking the compound of formula (I) to said strand(s) and the other of L1 and L2 is H, a protecting group, a phosphorus moiety or an internucleoside linking group linking the compound of formula (I) to said strand(s),
[0022] Y is O, NH, NR1 or N—C(═O)—R1, wherein R1 is:
   [0023] a (C1-C20) alkyl group, optionally substituted by one or more groups selected from an halogen atom, a (C1-C6) alkyl group, a (C3-C8) cycloalkyl group, a (C3-C14) heterocycle, a (C6-C14) aryl group, a (C5-C14) heteroaryl group, —O-Z1, —N(Z1)(Z2), —S-Z1, —CN, —C(=J)-O-Z1, —O—C(=J)-Z1, —C(=J)-N(Z1)(Z2), and —N(Z1)-C(=J)-Z2, wherein
[0024] J is O or S,
[0025] each of Z1 and Z2 is, independently, H, a (C1-C6) alkyl group, optionally substituted by one or more groups selected from a halogen atom and a (C1-C6) alkyl group,
   [0026] a (C3-C8) cycloalkyl group, optionally substituted by one or more groups selected from a halogen atom and a (C1-C6) alkyl group,
   [0027] a group —[C(═O)]m-R2-(O—CH₂—CH₂)p-R3, wherein
[0028] m is an integer meaning 0 or 1,
[0029] p is an integer ranging from 0 to 10,
[0030] R2 is a (C1-C20) alkylene group optionally substituted by a (C1-C6) alkyl group, —O-Z3, —N(Z3)(Z4), —S-Z3, —CN, —C(═K)—O—Z3, —O—C(═K)—Z3, —C(═K)—N(Z3)(Z4), or —N(Z3)-C(═K)—Z4,
[0031] wherein
[0032] K is O or S,
[0033] each of Z3 and Z4 is, independently, H, a (C1-C6) alkyl group, optionally substituted by one or more groups selected from a halogen atom and a (C1-C6) alkyl group,
[0034] and
[0035] R3 is selected from the group consisting of a hydrogen atom, a (C1-C6) alkyl group, a (C1-C6) alkoxy group, a (C3-C8) cycloalkyl group, a (C3-C14) heterocycle, a (C6-C14) aryl group or a (C5-C14) heteroaryl group,
[0036] or R3 is a cell targeting moiety,
   [0037] X1 and X2 are each, independently, a hydrogen atom, a (C1-C6) alkyl group, and
   [0038] each of Ra, Rb, Rc and Rd is, independently, H or a (C1-C6) alkyl group,
      or a pharmaceutically acceptable salt thereof.

[0039] In some embodiments, in the present dsRNA comprising one or more compounds of formula (I), Y is
[0040] a) NR1, R1 is a non-substituted (C1-C20) alkyl group;
[0041] b) NR1, R1 is a non-substituted (C1-C16) alkyl group, which includes an alkyl group selected from a group comprising methyl, isopropyl, butyl, octyl, and hexadecyl;
[0042] c) NR1, R1 is a (C3-C8) cycloalkyl group, optionally substituted by one or more groups selected from a halogen atom and a (C1-C6) alkyl group;
[0043] d) NR1, R1 is a cyclohexyl group;
[0044] e) NR1, R1 is a (C1-C20) alkyl group substituted by a (C6-C14) aryl group;
[0045] f) NR1, R1 is a methyl group substituted by a phenyl group;
[0046] g) N—C(═O)—R1, R1 is an optionally substituted (C1-C20) alkyl group; or
[0047] h) N—C(═O)—R1, R1 is methyl or pentadecyl.

[0048] In some embodiments, in the present dsRNA comprising one or more compounds of formula (I), B is selected from a group consisting of a pyrimidine, a substituted pyrimidine, a purine and a substituted purine, or a pharmaceutically acceptable salt thereof.

[0049] In some embodiments, in the present dsRNA comprising one or more compounds of formula (I), R3 is of the formula (II):

[chemical structure]

[0050] wherein A1, A2 and A3 are OH,
[0051] A4 is OH or NHC(═O)—R5, wherein R5 is a (C1-C6) alkyl group, optionally substituted by a halogen atom, or a pharmaceutically acceptable salt thereof.

[0052] In some embodiments, in the present dsRNA comprising one or more compounds of formula (I), R3 is N-acetyl-galactosamine, or a pharmaceutically acceptable salt thereof.

[0053] In some embodiments, the present dsRNA comprises one or more nucleotides from Tables A and B.

[0054] In some embodiments, the present dsRNA comprises from 2 to 10 compounds of formula (I), or a pharmaceutically acceptable salt thereof.

[0055] In some embodiments, the present dsRNA comprises 2 to 10 compounds of formula (I) on the sense strand.

[0056] In some embodiments, in the present dsRNA, the sense strand comprises two to five compounds of formula (I) at the 5′ end, and/or comprises one to three compounds of formula (I) at the 3′ end.

[0057] In some embodiments, in the present dsRNA,
[0058] a) the two to five compounds of formula (I) at the 5′ end of the sense strand comprise lgT3 and/or lgT7, optionally comprising three consecutive lgT3 nucleotides; and/or
[0059] b) the one to three compounds of formula (I) at the 3′ end of the sense strand comprise lT4 or lT3; optionally comprising two consecutive lT4.

[0060] In some embodiments, the present dsRNA comprises one or more internucleoside linking groups independently selected from the group consisting of phosphodiester, phosphotriester, phosphorothioate, phosphorodithioate, alkyl-phosphonate and phosphoramidate backbone linking groups, or a pharmaceutically acceptable salt thereof.

[0061] In some embodiments, the present dsRNA is selected from the dsRNAs in Tables 1-3.

[0062] In some embodiments, the sense strand comprises a nucleotide sequence selected from the group consisting of SEQ ID NOs: 858, 902, 907, 911, 915, 934, 970, 979, and 988; and the antisense strand comprises a nucleotide sequence selected from the group consisting of SEQ ID NOs: 1020, 1064, 1069, 1073, 1077, 1096, 1132, 1141, and 1150.

[0063] In some embodiments, the sense strand and antisense strand of the dsRNA respectively comprise the nucleotide sequences of: a) SEQ ID NOs: 858 and 1020; b) SEQ ID NOs: 902 and 1064; c) SEQ ID NOs: 907 and 1069; d) SEQ ID NOs: 911 and 1073; e) SEQ ID NOs: 915 and 1077; f) SEQ ID NOs: 934 and 1096; g) SEQ ID NOs: 970 and 1132; h) SEQ ID NOs: 979 and 1141; or i) SEQ ID NOs: 988 and 1150.

[0064] The present disclosure further provides a pharmaceutical composition comprising a dsRNA or DNA vector described herein, and a pharmaceutically acceptable excipient. The present disclosure further provides a pharmaceutical composition comprising a dsRNA as described herein, and a pharmaceutically acceptable excipient.

[0065] Also provided in this disclosure is the present dsRNA, DNA vector, or composition for use in inhibiting ANGPTL3 expression in a human in need thereof, or for use in treating or preventing an ANGPTL3-associated condition in a human in need thereof. The present disclosure also provides the dsRNA, or a composition comprising it, for use in inhibiting ANGPTL3 expression in a human in need thereof. In a particular embodiment, the expression of the ANGPTL3 gene in the liver of the human is inhibited by the dsRNA. The disclosure further provides a dsRNA, or a composition comprising it, for use in in treating or preventing an ANGPTL3-associated condition in a human in need thereof. In a particular embodiment, the ANGPTL3-associated condition is a lipid metabolism disorder. In a particular embodiment, the lipid metabolism disorder is hypertriglyceridemia.

[0066] Further provided in this disclosure is a method of inhibiting ANGPTL3 expression, or treating or preventing an ANGPTL3-associated condition, in a mammal (e.g., a human) in need thereof by administering the present dsRNA or composition to the mammal.

[0067] Further provided in this disclosure is the use of the present dsRNA in the manufacture of a medicament for inhibiting ANGPTL3 expression, or treating or preventing an ANGPTL3-associated condition, in a mammal (e.g., a human) in need thereof, as well as articles of manufacture (e.g., kits).

[0068] In some embodiments, the dsRNA inhibits the expression of the ANGPTL3 gene in the liver of the mammal (e.g., human) in the treatment methods. In certain embodiments, the ANGPTL3-associated condition is a lipid metabolism disorder, e.g., hypertriglyceridemia and associated diseases and conditions such as atherosclerosis, pancreatitis, and hyperlipidemia such as familial combined hyperlipidemia, familial hypercholesterolemia (e.g., HoFH), and polygenic hypercholesterolemia.

### BRIEF DESCRIPTION OF THE DRAWINGS

[0069] FIGS. 1A, 1B and 1C are graphs showing RT-qPCR analysis of ANGPTL3 mRNA expression in human Hep3B cell lysates following treatment with 164 test siRNAs as indicated at 0.1 or 1 nM, respectively. Expression of mRNA is represented relative to cells treated with a non-targeting siRNA control. Error bars indicate standard deviation.

[0070] FIG. 2 is a graph showing cytotoxic effects of 18 selected test siRNAs in human Hep3B cells. Cells were treated with siRNAs as indicated at 5 or 50 nM before being analyzed for viability (CellTiter-Glo assay) and toxicity (ToxiLight assay). Ratios of the resulting readings are shown relative to results for a non-targeting siRNA control. Error bars indicate standard deviation.

[0071] FIG. 3 is a graph of immune stimulation showing the amount of interferon α (IFNα) protein released into the supernatant of human peripheral blood mononuclear cells (PBMCs) isolated from three donors and transfected with selected GalNAc-conjugated siRNAs targeting ANGPTL3 or controls. Protein concentration was determined by ELISA. Error bars indicate standard deviation.

[0072] FIG. 4 is a graph showing cytotoxic effects of 11 selected GalNAc-conjugated test siRNAs in human primary hepatocytes following free uptake. Cells were treated with siRNAs as indicated at 1, 5, or 25 μM before being analyzed for viability (CellTiter-Glo assay) and toxicity (ToxiLight assay). Ratios of the resulting readings are shown relative to results for an untreated control, in comparison to toxic positive controls and a non-targeting siRNA control. Error bars indicate standard deviation.

[0073] FIG. 5 is a graph showing the amount of ANGPTL3 protein secreted into the supernatant of human primary hepatocytes treated with increasing concentrations of 11 selected GalNAc-siRNAs (free uptake) targeting ANGPTL3, as determined by ELISA. Error bars indicate standard deviation.

[0074] FIG. 6 is a graph showing the correlation between relative mRNA expression (as determined by qPCR) and protein expression (as determined by ELISA) observed in human primary hepatocytes following treatment with 11 selected GalNAc-siRNAs (plus a nucleotide control) at 10, 100, or 1000 nM, respectively (free uptake).

[0075] FIG. 7 is a graph showing serum ANGPTL3 protein levels of mice treated subcutaneously with selected GalNAc-siRNAs at 12 mg/kg at day 0. Treated mice express human ANGPTL 3 from a liver specific adeno-associated viral vector. Human ANGPTL3 levels were quantified by ELISA. Error bars indicate standard deviation.

[0076] FIG. 8 is a graph showing RT-qPCR analysis of ANGPTL3 mRNA expression in human Hep3B cell lysates following treatment with 52 additional test siRNAs as indicated at 0.1 or 1 nM, respectively. Expression of mRNA is represented relative to cells treated with a non-targeting siRNA control. Error bars indicate standard deviation.

[0077] FIG. 9 is a graph showing RT-qPCR analysis of ANGPTL3 mRNA expression in cynomolgus primary hepatocyte lysates following treatment with 52 additional test siRNAs as indicated at 0.1 and 1 nM, respectively. mRNA expression is represented relative to cells treated with a non-targeting siRNA control. Error bars indicate standard deviation.

[0078] FIG. 10 is a graph showing cytotoxic effects of 11 additional test siRNAs in human Hep3B cells. Cells were treated with siRNAs as indicated at 5 or 50 nM before being analyzed for viability (CellTiter-Glo assay) and toxicity (ToxiLight assay). Ratios of the resulting readings are shown relative to results for a non-targeting siRNA control. Error bars indicate standard deviation.

[0079] FIG. 11 is a graph of immune stimulation showing the amount of interferon α (IFNα) protein released into the supernatant of human peripheral blood mononuclear cells (PBMCs) isolated from three donors and transfected with selected GalNAc-conjugated siRNAs targeting ANGPTL3 or controls. Protein concentration was determined by ELISA. Error bars indicate standard deviation.

[0080] FIG. 12 is a graph showing cytotoxic effects of six selected GalNAc-conjugated test siRNAs in human primary hepatocytes following free uptake. Cells were treated with siRNAs as indicated at 1, 5, or 25 μM before being analyzed for viability (CellTiter-Glo assay) and toxicity (ToxiLight assay). Ratios of the resulting readings are shown relative to results for an untreated control, in comparison to toxic positive controls, a non-targeting siRNA control, and two siRNAs selected from the first round of screening. Error bars indicate standard deviation.

[0081] FIG. 13 is a graph showing the amount of ANGPTL3 protein secreted into the supernatant of human primary hepatocytes treated with increasing concentrations of 4 selected GalNAc-siRNAs (free uptake) targeting ANGPTL3, as determined by ELISA. Two siRNAs selected from the first round of screening were included as references. Error bars indicate standard deviation.

[0082] FIG. 14 is a graph showing serum ANGPTL3 protein levels of mice treated subcutaneously with selected GalNAc-siRNAs from both screening rounds at 10 mg/kg at day 0. Treated mice express human ANGPTL3 from a liver specific adeno-associated viral vector. Human ANGPTL3 levels were quantified by ELISA. Error bars indicate standard deviation.

[0083] FIGS. 15A-F are graphs showing RT-qPCR analysis of ANGPTL3 mRNA expression in primary human hepatocytes following treatment of the cells with 3×54 test siRNAs based on parent siRNA #013-c (FIGS. 15A and 15B), siRNA #051-c (FIGS. 15C and 15D), and siRNA #165-c (FIGS. 15E and 15F) at 1 nM, 10 nM, or 100 nM for 72 hours under free uptake conditions. Expression of mRNA is represented relative to cells treated with LV2, a non-targeting siRNA control. Error bars indicate standard deviation.

[0084] FIG. 16 is a graph showing immune stimulation indicated by the amount of interferon α2a (IFN-α2a) protein released into the supernatant of human peripheral blood mononuclear cells (PBMCs) isolated from three donors and transfected for 24 hours with 100 nM concentration of 24 selected modified GalNAc ANGPTL3 siRNAs together with respective parental sequences (siRNA #013-c, siRNA #051-c, and siRNA #165-c) or controls. Protein concentration was determined by ELISA. Error bars indicate standard deviation.

[0085] FIG. 17 is a graph showing cytotoxic effects of 24 selected modified GalNAc ANGPTL3 siRNAs together with respective parental sequences (siRNA #013-c, siRNA #051-c, and siRNA #165-c) in human Hep3B cells. Cells were transfected with siRNAs as indicated at 5 or 50 nM concentration for 72 hours before being analyzed for viability (CellTiter-Glo assay) and toxicity (ToxiLight assay). Ratios of the resulting readings are shown relative to results for a non-targeting siRNA control. Error bars indicate standard deviation.

[0086] FIGS. 18A, 18B, and 18C are graphs showing serum ANGPTL3 protein levels over time in mice treated once subcutaneously with selected GalNAc-siRNAs at 5 mg/kg at day 0. They show the results of 3×8 siRNAs based on parental sequences siRNA #013-c (FIG. 18A), siRNA #051-c (FIG. 18B), and siRNA #165-c (FIG. 18C). Treated mice express human ANGPTL3 from a liver-specific adeno-associated viral vector. Human ANGPTL3 levels were quantified by ELISA. Error bars indicate standard error of the mean.

### DETAILED DESCRIPTION OF THE INVENTION

[0087] The present disclosure provides novel double-stranded RNAs (dsRNAs) that inhibit expression of an angiopoietin-like protein 3 (ANGPTL3) gene. In some embodiments, the dsRNAs are small interfering RNAs (siRNAs). The dsRNAs can be used to treat conditions such as lipid metabolism disorders (e.g., dyslipidemia, mixed-dyslipidemia, hypertriglyceridemia, and associated diseases such as pancreatitis). Unless otherwise stated, “ANGPTL3” refers to human ANGPTL3 herein. An mRNA sequence of a human ANGPTL3 protein is available under NCBI Reference Sequence No. NM_014495.3 (SEQ ID NO: 1181) and its polypeptide sequence is available under NCBI Reference Sequence No. NP_055310.1 (SEQ ID NO: 1182). In certain embodiments, the present disclosure refers to cynomolgus ANGPTL3. An mRNA sequence of a cynomolgus ANGPTL3 protein is available under NCBI Reference Sequence No. XM_005543185.1 (SEQ ID NO: 1183) and its polypeptide sequence is available under NCBI Reference Sequence No. XP_005543242.1 (SEQ ID NO: 1184).

[0088] A dsRNA of the present disclosure (e.g., a dsRNA with or without a GalNAc moiety)_may have one, two, three, or all four of the following properties: (i) has a half-life of at least 24, 26, 28, 30, 32, 48, 52, 56, 60, 72, 96, or 168 hours in vitro; (ii) does not increase production of interferon α secreted from human primary PMBCs; (iii) has an IC₅₀ value of no greater than 0.001, 0.01, 0.1, 0.3, 1, 1.5, 2, 3, 4, 5, 6, 7, 8, 9, or 10 nM for inhibition of human ANGPTL3 expression in vitro (in, e.g., human Hep3B cells, human primary hepatocytes, or cynomolgus primary hepatocytes as described in the working examples below); and (iv) reduces protein levels of ANGPTL3 by at least 50%, 55%, 60%, 65%, 70%, 75%, 80%, 85%, 90%, 95%, 96%, 97%, 98%, or 99% in vivo in C57BL/6 mice expressing human ANGPTL3 (e.g., at 5, 10, 15 or more mg/kg).

[0089] In some embodiments, a dsRNA of the present disclosure comprises a GalNAc moiety and has one, two, three, or all four of the following properties: (i) has a half-life of at least 24, 48, 72, 96, or 168 hours in vitro; (ii) does not increase production of interferon α secreted from human primary PMBCs, (iii) has an IC₅₀ value of no greater than 9.68 nM for inhibition of human ANGPTL3 expression in vitro in human or cynomolgus primary hepatocytes; and (iv) reduces protein levels of human ANGPTL3 by at least 60% in vivo in C57BL/6 mice expressing human ANGPTL3 after a single subcutaneous dose of 5 mg/kg. In certain embodiments, the dsRNA has all of said properties.

[0090] It will be understood by the person skilled in the art that the dsRNAs described herein do not occur in nature (“isolated” dsRNAs).

### I. Double-Stranded RNAs

[0091] Certain aspects of the present disclosure relate to double-stranded ribonucleic acid (dsRNA) molecules targeting ANGPTL3. As used herein, the term “double-stranded RNA” or “dsRNA” refers to an oligoribonucleotide molecule comprising a duplex structure having two anti-parallel and substantially complementary nucleic acid strands. The two strands forming the duplex structure may be different portions of one larger RNA molecule, or they may be on separate RNA molecules. When the two strands are on separate RNA molecules, the dsRNA structure may function as short interfering RNA (siRNA). Where the two strands are part of one larger molecule and are connected by an uninterrupted chain of nucleotides between the 3′-end of a first strand and the 5′-end of a second strand, the connecting RNA chain is referred to as a “hairpin loop” and the RNA molecule may be termed “short hairpin RNA,” or “shRNA.” The RNA strands may have the same or a different number of nucleotides. In addition to the duplex structure, a dsRNA may comprise overhangs of one or more (e.g., 1, 2 or 3) nucleotides. A dsRNA of the present disclosure may further comprise a targeting moiety (with or without a linker) as further described below.

[0092] As used herein, the term “polynucleotide” refers to a polymeric form of nucleotides of at least 10 bases in length, either ribonucleotides or deoxyribonucleotides or a modified form of either type of nucleotide. The term includes single and double stranded forms.

[0093] A “dsRNA” may include naturally occurring ribonucleotides, and/or chemically modified analogs thereof. As used herein, “dsRNAs” are not limited to those with ribose-containing nucleotides. A dsRNA herein encompasses a double-stranded polynucleotide molecule where the ribose moiety in some or all of its nucleotides has been replaced by another moiety, so long as the resultant double-stranded molecule can inhibit the expression of a target gene by RNA interference. The dsRNA may also include one or more, but not more than 60% (e.g., not more than 50%, 40%, 30%, 20%, or 10%) deoxyribonucleotides or chemically modified analogs thereof.

[0094] A dsRNA of the present disclosure comprises a sense strand comprising a sense sequence, and an antisense strand comprising an antisense sequence, wherein the sense strand and the antisense strand are sufficiently complementary to hybridize to form a duplex structure. The term “antisense sequence” refers to a sequence that is substantially or fully complementary, and binds under physiological conditions, to a target RNA sequence in a cell. A “target sequence” refers to a nucleotide sequence on an RNA molecule (e.g., a primary RNA transcript or a messenger RNA transcript) transcribed from a target gene, e.g., an ANGPTL3 gene. The term “sense sequence” refers to a sequence that is substantially or fully complementary to the antisense sequence.

[0095] The ANGPTL3-targeting dsRNA of the present disclosure comprises a sense strand comprising a sense sequence and an antisense strand comprising an antisense sequence, wherein the sense and antisense sequences are substantially or fully complementary to each other. Unless otherwise indicated, the term “complementary” refers herein to the ability of a polynucleotide comprising a first contiguous nucleotide sequence, under certain conditions, e.g., physiological conditions, to hybridize to and form a duplex structure with another polynucleotide comprising a second contiguous nucleotide sequence. This may include base-pairing of the two polynucleotides over the entire length of the first or second contiguous nucleotide sequence; in this case, the two nucleotide sequences are considered “fully complementary” to each other. For example, in a case where a dsRNA comprises a first oligonucleotide 21 nucleotides in length and a second oligonucleotide 23 nucleotides in length, and where the two oligonucleotides form 21 contiguous base-pairs, the two oligonucleotides may be referred to as “fully complementary” to each other. Where a first polynucleotide sequence is referred to as “substantially complementary” to a second polynucleotide sequence, the two sequences may base-pair with each other over 80% or more (e.g., 90% or more) of their length of hybridization, with no more than 20% (e.g., no more than 10%) of mismatching base-pairs (e.g., for a duplex of 20 nucleotides, no more than 4 or no more than 2 mismatched base-pairs). Where two oligonucleotides are designed to form a duplex with one or more single-stranded overhangs, such overhangs shall not be regarded as mismatches for the determination of complementarity. Complementarity of two sequences may be based on Watson-Crick base-pairs and/or non-Watson-Crick base-pairs. As used herein, a polynucleotide which is “substantially complementary to at least part of” an mRNA refers to a polynucleotide which is substantially complementary to a contiguous portion of an mRNA of interest (e.g., an mRNA encoding ANGPTL3).

[0096] In some embodiments, the ANGPTL3-targeting dsRNA is an siRNA where the sense and antisense strands are not covalently linked to each other. In some embodiments, the sense and antisense strands of the ANGPTL3-targeting dsRNA are covalently linked to each other, e.g., through a hairpin loop (such as in the case of shRNA), or by means other than a hairpin loop (such as by a connecting structure referred to as a “covalent linker”).

### I.1 Lengths

[0097] In some embodiments, each of the sense sequence (in the sense strand) and the antisense sequence (in the antisense strand) is 9-30 nucleotides in length. For example, each sequence can be any of a range of nucleotide lengths having an upper limit of 21, 22, 23, 24, 25, 26, 27, 28, 29, or 30 and an independently selected lower limit of 9, 10, 11, 12, 13, 14, 15, 16, 17, 18, 19, or 20. In some embodiments, the number of nucleotides in each sequence may be 15-25, 15-30, 16-29, 17-28, 18-28, 18-27, 18-26, 18-25, 18-24, 18-23, 18-22, 18-21, 18-20, 19-30, 19-29, 19-28, 19-27, 19-26, 19-25, 19-24, 19-23, 19-22, or 19-21.

[0098] In some embodiments, each sequence is greater than 8, 9, 10, 11, 12, 13, 14, 15, 16, 17, 18, 19, 20, 21, 22, 23, 24, 25, 26, 27, 28, 29, or 30 nucleotides in length. In some embodiments, each sequence is less than 21, 22, 23, 24, 25, 26, 27, 28, 29, 30, or 31 nucleotides in length. In some embodiments, each sequence is 9, 10, 11, 12, 13, 14, 15, 16, 17, 18, 19, 20, 21, 22, 23, 24, 25, 26, 27, 28, 29, or 30 nucleotides in length.

[0099] In some embodiments, the sense and antisense sequences are each at least 15 and no greater than 25 nucleotides in length. In some embodiments, the sense and antisense sequences are each at least 19 and no greater than 25 nucleotides in length. For example, the sequences are 15, 16, 17, 18, 19, 20, 21, 22, 23, 24, or 25 nucleotides in length.

[0100] The sense sequence and antisense sequence may be of the same or different lengths. For example, the antisense sequence may have 21 nucleotides while the sense sequence may have 23 nucleotides. In another example, the antisense sequence and the sense sequence both have 19 nucleotides.

[0101] In some embodiments, the ANGPTL3-targeting dsRNA has sense and antisense strands of the same length or different lengths. For example, the sense strand may be 1, 2, 3, 4, 5, 6, or 7 nucleotides longer than the antisense strand. Alternatively, the sense strand may be 1, 2, 3, 4, 5, 6, or 7 nucleotides shorter than the antisense strand.

[0102] In some embodiments, each of the sense strand and the antisense strand is 9-36 nucleotides in length. For example, each strand can be any of a range of nucleotide lengths having an upper limit of 21, 22, 23, 24, 25, 26, 27, 28, 29, 30, 31, 32, 33, 34, 35, or 36 and an independently selected lower limit of 9, 10, 11, 12, 13, 14, 15, 16, 17, 18, 19, or 20. In some embodiments, the number of nucleotides in each strand may be 15-25, 15-30, 16-29, 17-28, 18-28, 18-27, 18-26, 18-25, 18-24, 18-23, 18-22, 18-21, 18-20, 19-30, 19-29, 19-28, 19-27, 19-26, 19-25, 19-24, 19-23, 19-22, or 19-21.

[0103] In some embodiments, each strand is greater than 8, 9, 10, 11, 12, 13, 14, 15, 16, 17, 18, 19, 20, 21, 22, 23, 24, 25, 26, 27, 28, 29, or 30 nucleotides in length. In some embodiments, each strand is less than 20, 21, 22, 23, 24, 25, 26, 27, 28, 29, 30, 31, 32, 33, 34, 35, 36, or 37 nucleotides in length. In some embodiments, each strand is 9, 10, 11, 12, 13, 14, 15, 16, 17, 18, 19, 20, 21, 22, 23, 24, 25, 26, 27, 28, 29, 30, 31, 32, 33, 34, 35, or 36 nucleotides in length.

[0104] In some embodiments, the sense and antisense strands are each at least 15 and no greater than 25 nucleotides in length. In some embodiments, the sense and antisense strands are each at least 19 and no greater than 23 nucleotides in length. For example, the strands are 19, 20, 21, 22, or 23 nucleotides in length.

[0105] In some embodiments, the sense strand may have 21, 22, 23, 24, or 25 nucleotides, including any modified nucleotides, while the antisense strand may have 21, 22, or 23 nucleotides, including any modified nucleotides. In certain embodiments, the sense strand may have a sense sequence having 19, 20, or 21 nucleotides, while the antisense strand may have an antisense sequence having 19, 20, or 21 nucleotides.

### I.2 Overhangs

[0106] In some embodiments, a dsRNA of the present disclosure comprises one or more overhangs at the 3′-end, 5′-end, or both ends of one or both of the sense and antisense strands. In some embodiments, the one or more overhangs improve the stability and/or inhibitory activity of the dsRNA.

[0107] “Overhang” refers herein to the unpaired nucleotide(s) that protrude from the duplex structure of a dsRNA when a 3′ end of a first strand of the dsRNA extends beyond the 5′ end of a second strand, or vice versa. “Blunt end” means that there are no unpaired nucleotides at that end of the dsRNA, i.e., no nucleotide overhang. A “blunt-ended” dsRNA is a dsRNA that is double-stranded over its entire length, i.e., no nucleotide overhang at either end of the duplex molecule. Chemical caps or non-nucleotide chemical moieties conjugated to the 3′ end and/or the 5′ end of a dsRNA are not considered herein in determining whether a dsRNA has an overhang or not.

[0108] In some embodiments, an overhang comprises one or more, two or more, three or more, or four or more nucleotides. For example, the overhang may comprise 1, 2, 3, or 4 nucleotides.

[0109] In some embodiments, an overhang of the present disclosure comprises one or more nucleotides (e.g., ribonucleotides or deoxyribonucleotides, naturally occurring or chemically modified analogs thereof). In some embodiments, the overhang comprises one or more thymines or chemically modified analogs thereof. In certain embodiments, the overhang comprises one or more thymines.

[0110] In some embodiments, the dsRNA comprises an overhang located at the 3′-end of the antisense strand. In some embodiments, the dsRNA comprises a blunt end at the 5′-end of the antisense strand. In some embodiments, the dsRNA comprises an overhang located at the 3′-end of the antisense strand and a blunt end at the 5′-end of the antisense strand. In some embodiments, the dsRNA comprises an overhang located at the 3′-end of the sense strand. In some embodiments, the dsRNA comprises a blunt end at the 5′-end of the sense strand. In some embodiments, the dsRNA comprises an overhang located at the 3′-end of the sense strand and a blunt end at the 5′-end of the sense strand. In some embodiments, the dsRNA comprises overhangs located at the 3′-end of both the sense and antisense strands of the dsRNA.

[0111] In some embodiments, the dsRNA comprises an overhang located at the 5′-end of the antisense strand. In some embodiments, the dsRNA comprises a blunt end at the 3′-end of the antisense strand. In some embodiments, the dsRNA comprises an overhang located at the 5′-end of the antisense strand and a blunt end at the 3′-end of the antisense strand. In some embodiments, the dsRNA comprises an overhang located at the 5′-end of the sense strand. In some embodiments, the dsRNA comprises a blunt end at the 3′-end of the sense strand. In some embodiments, the dsRNA comprises an overhang located at the 5′-end of the sense strand and a blunt end at the 3′-end of the sense strand. In some embodiments, the dsRNA comprises overhangs located at both the 5′-end of the sense and antisense strands of the dsRNA.

[0112] In some embodiments, the dsRNA comprises an overhang located at the 3′-end of the antisense strand and an overhang at the 5′-end of the antisense strand. In some embodiments, the dsRNA comprises an overhang located at the 3′-end of the sense strand and an overhang at the 5′-end of the sense strand.

[0113] In some embodiments, the dsRNA has two blunt ends.

[0114] In some embodiments, the overhang is the result of the sense strand being longer than the antisense strand. In some embodiments, the overhang is the result of the antisense strand being longer than the sense strand. In some embodiments, the overhang is the result of sense and antisense strands of the same length being staggered. In some embodiments, the overhang forms a mismatch with the target mRNA. In some embodiments, the overhang is complementary to the target mRNA.

[0115] In certain embodiments, a dsRNA of the present disclosure contains a sense strand having the sequence of 5′-CCA-[sense sequence]-invdT, and the antisense strand having the sequence of 5′-[antisense sequence]-dTdT-3′, where the trinucleotide CCA may be modified (e.g., 2′-O-Methyl-C and 2′-O-Methyl-A).

I.3 Target and dsRNA Sequences

[0116] The antisense strand of a dsRNA of the present disclosure comprises an antisense sequence that may be substantially or fully complementary to a target sequence of 12-30 nucleotides in length in an ANGPTL3 RNA (e.g., an mRNA). For example, the target sequence can be any of a range of nucleotide lengths having an upper limit of 19, 20, 21, 22, 23, 24, 25, 26, 27, 28, 29, or 30 and an independently selected lower limit of 12, 13, 14, 15, 16, 17, 18, or 19. In some embodiments, the number of nucleotides in the target sequence may be 15-25, 15-30, 16-29, 17-28, 18-28, 18-27, 18-26, 18-25, 18-24, 18-23, 18-22, 18-21, 18-20, 19-30, 19-29, 19-28, 19-27, 19-26, 19-25, 19-24, 19-23, 19-22, or 19-21.

[0117] In some embodiments, the target sequence is greater than 12, 13, 14, 15, 16, 17, 18, 19, or 20 nucleotides in length. In some embodiments, the target sequence is less than 21, 22, 23, 24, 25, 26, 27, 28, 29, or 30 nucleotides in length. In some embodiments, the target sequence is 12, 13, 14, 15, 16, 17, 18, 19, 20, 21, 22, 23, 24, 25, 26, 27, 28, 29, or 30 nucleotides in length. In certain embodiments, the target sequence is at least 15 and no greater than 25 nucleotides in length; for example, at least 19 and no greater than 23 nucleotides in length, or 15, 16, 17, 18, 19, 20, 21, 22, 23, 24, or 25 nucleotides in length.

[0118] The target sequence may be in the 5′-noncoding region, the coding region, or the 3′ noncoding region of the ANGPTL3 mRNA transcript. The target sequence may also be located at the junction of the noncoding and coding regions.

[0119] In some embodiments, the dsRNA antisense strand comprises an antisense sequence having one or more mismatch (e.g., one, two, three, or four mismatches) to the target sequence. In certain embodiments, the antisense sequence is fully complementary to the corresponding portion in the human ANGPTL3 mRNA sequence and is fully complementary or substantially complementary (e.g., comprises at least one or two mismatches) to the corresponding portion in a cynomolgus ANGPTL3 mRNA sequence. One advantage of such dsRNAs is to allow pre-clinical in vivo studies of the dsRNAs in non-human primates such as cynomolgus monkeys. In certain embodiments, the dsRNA sense strand comprises a sense sequence that is at least 70%, 75%, 80%, 85%, 90%, 95%, 96%, 97%, 98%, or 99% identical to the target sequence (e.g., in human or cynomolgus ANGPTL3 mRNA).

[0120] In some embodiments, the target sequence in a human ANGPTL3 mRNA sequence (SEQ ID NO:1181) has start and end nucleotide positions at or around (e.g., within 3 nucleotides of) the following nucleotides: 135 and 153, 143 and 161, 143 and 163, 144 and 162, 145 and 163, 150 and 168, 151 and 169, 1528 and 1546, 1530 and 1548, 1532 and 1550, 1533 and 1551, 1535 and 1553, 1602 and 1620, 2612 and 2630, and 2773 and 2791. In some embodiments, the target sequence has a start nucleotide position between 135 and 151 and an end nucleotide position between 153 and 169, or a start nucleotide position between 1528 and 1535 and an end nucleotide position between 1546 and 1553. In certain embodiments, the target sequence corresponds to nucleotide positions 135-153, 143-161, 144-162, 145-163, 150-168, or 1535-1553 of the human ANGPTL3 mRNA sequence, where the start and end positions may vary within 3 nucleotides of the numbered positions. In some embodiments, the target sequence is a sequence listed in Table 1 as a sense sequence, or a sequence that includes at least 80% nucleotides (e.g., at least 90%) of the listed sequence.

[0121] In some embodiments, a dsRNA of the present disclosure comprises a sense strand comprising a sense sequence shown in Table 1. For example, the sense strand comprises a sequence selected from SEQ ID NOs: 13-15, 47-51, 55, 129, 142, 165, 171, 172, and 212, or a sequence having at least 15, 16, 17, or 18 contiguous nucleotides derived from said selected sequence. In certain embodiments, the sense strand comprises a sequence selected from SEQ ID NOs: 13-15, 51, 165, and 171.

[0122] In some embodiments, a dsRNA of the present disclosure comprises an antisense strand comprising an antisense sequence shown in Table 1. In some embodiments, the antisense strand comprises a sequence selected from SEQ ID NOs: 227-229, 261-265, 269, 343, 356, 379, 385, 386, and 426, or a sequence having at least 15, 16, 17, or 18 contiguous nucleotides derived from said selected sequence. In certain embodiments, the antisense strand comprises a sequence selected from SEQ ID NOs: 227-229, 265, 379, and 385.

[0123] In some embodiments, a dsRNA of the present disclosure comprises a sense strand comprising a sense sequence shown in Table 1 and an antisense strand comprising an antisense sequence shown in Table 1. In some embodiments, the sense and antisense strands respectively comprise the sequences of:
[0124] SEQ ID NOs: 13 and 227;
[0125] SEQ ID NOs: 14 and 228;
[0126] SEQ ID NOs: 15 and 229;
[0127] SEQ ID NOs: 47 and 261;
[0128] SEQ ID NOs: 48 and 262;
[0129] SEQ ID NOs: 49 and 263;
[0130] SEQ ID NOs: 50 and 264;
[0131] SEQ ID NOs: 51 and 265;
[0132] SEQ ID NOs: 55 and 269;
[0133] SEQ ID NOs: 129 and 343;
[0134] SEQ ID NOs: 142 and 356;
[0135] SEQ ID NOs: 165 and 379;
[0136] SEQ ID NOs: 171 and 385;
[0137] SEQ ID NOs: 172 and 386; or
[0138] SEQ ID NOs: 212 and 426.

[0139] In certain embodiments, the sense and antisense strands respectively comprise the sequences of:
[0140] SEQ ID NOs: 13 and 227;
[0141] SEQ ID NOs: 14 and 228;
[0142] SEQ ID NOs: 15 and 229;
[0143] SEQ ID NOs: 51 and 265;
[0144] SEQ ID NOs: 165 and 379; or
[0145] SEQ ID NOs: 171 and 385.

[0146] In some embodiments, the antisense sequence is fully complementary to a sequence selected from SEQ ID NOs: 13-15, 47-51, 55, 129, 142, 165, 171, 172, and 212. In some embodiments, the antisense sequence is substantially complementary to a sequence selected from SEQ ID NOs: 13-15, 47-51, 55, 129, 142, 165, 171, 172, and 212, wherein the antisense sequence comprises at least one mismatch (e.g., one, two, three, or four mismatches) to the selected sequence.

[0147] In some embodiments, the antisense sequence is fully complementary to a sequence selected from SEQ ID NOs: 13-15, 51, 165, and 171. In some embodiments, the antisense sequence is substantially complementary to a sequence selected from SEQ ID NOs: 13-15, 51, 165, and 171, wherein the antisense sequence comprises at least one mismatch (e.g., one, two, three, or four mismatches) to the selected sequence.

[0148] In some embodiments, the antisense sequence of the ANGPTL3-targeting dsRNA comprises one or more mismatches to the target sequence (for example, due to allelic differences among individuals in a general population). For example, the antisense sequence comprises one or more mismatches (e.g., one, two, three, or four mismatches) to the target sequence. In some embodiments, the one or more mismatches are not located in the center of the region of complementarity. In some embodiments, the one or more mismatches are located within five, four, three, two, or one nucleotide of the 5′ and/or 3′ ends of the region of complementarity. For example, for a dsRNA containing a 19 nucleotide antisense sequence, in some embodiments the antisense sequence may not contain any mismatch within the central 9 nucleotides of the region of complementarity between it and its target sequence in the ANGPTL3 mRNA.

[0149] Table 1 below lists the sense and antisense sequences of exemplary siRNA constructs (CNST). The start (ST) and end (ED) nucleotide positions in NM_014495.3 (SEQ ID NO:1181) are indicated. “SEQ” denotes SEQ ID NOs.

TABLE 1
Sequences of Exemplary siRNA Constructs

| CNST | | | Sense Sequence | | Antisense Sequence | |
|---|---|---|---|---|---|---|
| # | ST | ED | (5′-3′) | SEQ | (5′-3′) | SEQ |
| 001 | 2 | 20 | UAUAUAGAGUUAAGAAGUC | 1 | GACUUCUUAACUCUAUAUA | 215 |
| 002 | 3 | 21 | AUAUAGAGUUAAGAAGUCU | 2 | AGACUUCUUAACUCUAUAU | 216 |
| 003 | 4 | 22 | UAUAGAGUUAAGAAGUCUA | 3 | UAGACUUCUUAACUCUAUA | 217 |
| 004 | 9 | 27 | AGUUAAGAAGUCUAGGUCU | 4 | AGACCUAGACUUCUUAACU | 218 |
| 005 | 10 | 28 | GUUAAGAAGUCUAGGUCUG | 5 | CAGACCUAGACUUCUUAAC | 219 |
| 006 | 11 | 29 | UUAAGAAGUCUAGGUCUGC | 6 | GCAGACCUAGACUUCUUAA | 220 |
| 007 | 12 | 30 | UAAGAAGUCUAGGUCUGCU | 7 | AGCAGACCUAGACUUCUUA | 221 |
| 008 | 13 | 31 | AAGAAGUCUAGGUCUGCUU | 8 | AAGCAGACCUAGACUUCUU | 222 |
| 009 | 14 | 32 | AGAAGUCUAGGUCUGCUUC | 9 | GAAGCAGACCUAGACUUCU | 223 |
| 010 | 15 | 33 | GAAGUCUAGGUCUGCUUCC | 10 | GGAAGCAGACCUAGACUUC | 224 |
| 011 | 16 | 34 | AAGUCUAGGUCUGCUUCCA | 11 | UGGAAGCAGACCUAGACUU | 225 |
| 012 | 141 | 159 | CAAGACAAUUCAUCAUUUG | 12 | CAAAUGAUGAAUUGUCUUG | 226 |
| 013 | 143 | 161 | AGACAAUUCAUCAUUUGAU | 13 | AUCAAAUGAUGAAUUGUCU | 227 |
| 014 | 144 | 162 | GACAAUUCAUCAUUUGAUU | 14 | AAUCAAAUGAUGAAUUGUC | 228 |
| 015 | 145 | 163 | ACAAUUCAUCAUUUGAUUC | 15 | GAAUCAAAUGAUGAAUUGU | 229 |
| 016 | 601 | 619 | GCAUCAAAGACCUUCUCCA | 16 | UGGAGAAGGUCUUUGAUGC | 230 |
| 017 | 720 | 738 | AUUUCUCUAUCUUCCAAGC | 17 | GCUUGGAAGAUAGAGAAAU | 231 |
| 018 | 723 | 741 | UCUCUAUCUUCCAAGCCAA | 18 | UUGGCUUGGAAGAUAGAGA | 232 |
| 019 | 724 | 742 | CUCUAUCUUCCAAGCCAAG | 19 | CUUGGCUUGGAAGAUAGAG | 233 |
| 020 | 725 | 743 | UCUAUCUUCCAAGCCAAGA | 20 | UCUUGGCUUGGAAGAUAGA | 234 |
| 021 | 726 | 744 | CUAUCUUCCAAGCCAAGAG | 21 | CUCUUGGCUUGGAAGAUAG | 235 |
| 022 | 748 | 766 | CAAGAACUACUCCCUUUCU | 22 | AGAAAGGGAGUAGUUCUUG | 236 |
| 023 | 750 | 768 | AGAACUACUCCCUUUCUUC | 23 | GAAGAAAGGGAGUAGUUCU | 237 |
| 024 | 751 | 769 | GAACUACUCCCUUUCUUCA | 24 | UGAAGAAAGGGAGUAGUUC | 238 |
| 025 | 752 | 770 | AACUACUCCCUUUCUUCAG | 25 | CUGAAGAAAGGGAGUAGUU | 239 |
| 026 | 785 | 803 | AAAUGUAAAACAUGAUGGC | 26 | GCCAUCAUGUUUUACAUUU | 240 |
| 027 | 786 | 804 | AAUGUAAAACAUGAUGGCA | 27 | UGCCAUCAUGUUUUACAUU | 241 |
| 028 | 790 | 808 | UAAAACAUGAUGGCAUUCC | 28 | GGAAUGCCAUCAUGUUUUA | 242 |
| 029 | 887 | 905 | UUUUCAUGUCUACUGUGAU | 29 | AUCACAGUAGACAUGAAAA | 243 |
| 030 | 888 | 906 | UUUCAUGUCUACUGUGAUG | 30 | CAUCACAGUAGACAUGAAA | 244 |
| 031 | 890 | 908 | UCAUGUCUACUGUGAUGUU | 31 | AACAUCACAGUAGACAUGA | 245 |
| 032 | 1068 | 1086 | GUUUUACGAAUUGAGUUGG | 32 | CCAACUCAAUUCGUAAAAC | 246 |
| 033 | 1069 | 1087 | UUUUACGAAUUGAGUUGGA | 33 | UCCAACUCAAUUCGUAAAA | 247 |
| 034 | 1142 | 1160 | CGAAACCAACUAUACGCUA | 34 | UAGCGUAUAGUUGGUUUCG | 248 |
| 035 | 1143 | 1161 | GAAACCAACUAUACGCUAC | 35 | GUAGCGUAUAGUUGGUUUC | 249 |
| 036 | 1144 | 1162 | AAACCAACUAUACGCUACA | 36 | UGUAGCGUAUAGUUGGUUU | 250 |
| 037 | 1145 | 1163 | AACCAACUAUACGCUACAU | 37 | AUGUAGCGUAUAGUUGGUU | 251 |
| 038 | 1235 | 1253 | UCACAAAGCAAAAGGACAC | 38 | GUGUCCUUUUGCUUUGUGA | 252 |
| 039 | 1270 | 1288 | GUUAUUCAGGAGGCUGGUG | 39 | CACCAGCCUCCUGAAUAAC | 253 |
| 040 | 1271 | 1289 | UUAUUCAGGAGGCUGGUGG | 40 | CCACCAGCCUCCUGAAUAA | 254 |
| 041 | 1272 | 1290 | UAUUCAGGAGGCUGGUGGU | 41 | ACCACCAGCCUCCUGAAUA | 255 |
| 042 | 1503 | 1521 | CUCAUUCCAAGUUAAUGUG | 42 | CACAUUAACUUGGAAUGAG | 256 |
| 043 | 1504 | 1522 | UCAUUCCAAGUUAAUGUGG | 43 | CCACAUUAACUUGGAAUGA | 257 |
| 044 | 1505 | 1523 | CAUUCCAAGUUAAUGUGGU | 44 | ACCACAUUAACUUGGAAUG | 258 |
| 045 | 1525 | 1543 | UAAUAAUCUGGUAUUAAAU | 45 | AUUUAAUACCAGAUUAUUA | 259 |
| 046 | 1526 | 1544 | AAUAAUCUGGUAUUAAAUC | 46 | GAUUUAAUACCAGAUUAUU | 260 |
| 047 | 1528 | 1546 | UAAUCUGGUAUUAAAUCCU | 47 | AGGAUUUAAUACCAGAUUA | 261 |
| 048 | 1530 | 1548 | AUCUGGUAUUAAAUCCUUA | 48 | UAAGGAUUUAAUACCAGAU | 262 |
| 049 | 1532 | 1550 | CUGGUAUUAAAUCCUUAAG | 49 | CUUAAGGAUUUAAUACCAG | 263 |
| 050 | 1533 | 1551 | UGGUAUUAAAUCCUUAAGA | 50 | UCUUAAGGAUUUAAUACCA | 264 |
| 051 | 1535 | 1553 | GUAUUAAAUCCUUAAGAGA | 51 | UCUCUUAAGGAUUUAAUAC | 265 |
| 052 | 1596 | 1614 | AUUUAAGAUUAAACAUACA | 52 | UGUAUGUUUAAUCUUAAAU | 266 |
| 053 | 1600 | 1618 | AAGAUUAAACAUACAAUCA | 53 | UGAUUGUAUGUUUAAUCUU | 267 |
| 054 | 1601 | 1619 | AGAUUAAACAUACAAUCAC | 54 | GUGAUUGUAUGUUUAAUCU | 268 |
| 055 | 1602 | 1620 | GAUUAAACAUACAAUCACA | 55 | UGUGAUUGUAUGUUUAAUC | 269 |
| 056 | 1606 | 1624 | AAACAUACAAUCACAUAAC | 56 | GUUAUGUGAUUGUAUGUUU | 270 |
| 057 | 1607 | 1625 | AACAUACAAUCACAUAACC | 57 | GGUUAUGUGAUUGUAUGUU | 271 |
| 058 | 1608 | 1626 | ACAUACAAUCACAUAACCU | 58 | AGGUUAUGUGAUUGUAUGU | 272 |
| 059 | 1610 | 1628 | AUACAAUCACAUAACCUUA | 59 | UAAGGUUAUGUGAUUGUAU | 273 |
| 060 | 1612 | 1630 | ACAAUCACAUAACCUUAAA | 60 | UUUAAGGUUAUGUGAUUGU | 274 |
| 061 | 1613 | 1631 | CAAUCACAUAACCUUAAAG | 61 | CUUUAAGGUUAUGUGAUUG | 275 |
| 062 | 1614 | 1632 | AAUCACAUAACCUUAAAGA | 62 | UCUUUAAGGUUAUGUGAUU | 276 |
| 063 | 1615 | 1633 | AUCACAUAACCUUAAAGAA | 63 | UUCUUUAAGGUUAUGUGAU | 277 |
| 064 | 1616 | 1634 | UCACAUAACCUUAAAGAAU | 64 | AUUCUUUAAGGUUAUGUGA | 278 |
| 065 | 1617 | 1635 | CACAUAACCUUAAAGAAUA | 65 | UAUUCUUUAAGGUUAUGUG | 279 |
| 066 | 1618 | 1636 | ACAUAACCUUAAAGAAUAC | 66 | GUAUUCUUUAAGGUUAUGU | 280 |
| 067 | 1619 | 1637 | CAUAACCUUAAAGAAUACC | 67 | GGUAUUCUUUAAGGUUAUG | 281 |
| 068 | 1643 | 1661 | CAUUUCUCAAUCAAAAUUC | 68 | GAAUUUUGAUUGAGAAAUG | 282 |
| 069 | 1646 | 1664 | UUCUCAAUCAAAAUUCUUA | 69 | UAAGAAUUUUGAUUGAGAA | 283 |
| 070 | 1683 | 1701 | AUUUUGUGAUGUGGGAAUC | 70 | GAUUCCCACAUCACAAAAU | 284 |
| 071 | 1684 | 1702 | UUUUGUGAUGUGGGAAUCA | 71 | UGAUUCCCACAUCACAAAA | 285 |
| 072 | 1685 | 1703 | UUUGUGAUGUGGGAAUCAA | 72 | UUGAUUCCCACAUCACAAA | 286 |
| 073 | 1686 | 1704 | UUGUGAUGUGGGAAUCAAU | 73 | AUUGAUUCCCACAUCACAA | 287 |
| 074 | 1687 | 1705 | UGUGAUGUGGGAAUCAAUU | 74 | AAUUGAUUCCCACAUCACA | 288 |
| 075 | 1688 | 1706 | GUGAUGUGGGAAUCAAUUU | 75 | AAAUUGAUUCCCACAUCAC | 289 |
| 076 | 1689 | 1707 | UGAUGUGGGAAUCAAUUUU | 76 | AAAAUUGAUUCCCACAUCA | 290 |
| 077 | 1690 | 1708 | GAUGUGGGAAUCAAUUUUA | 77 | UAAAAUUGAUUCCCACAUC | 291 |
| 078 | 1691 | 1709 | AUGUGGGAAUCAAUUUUAG | 78 | CUAAAAUUGAUUCCCACAU | 292 |
| 079 | 1692 | 1710 | UGUGGGAAUCAAUUUUAGA | 79 | UCUAAAAUUGAUUCCCACA | 293 |
| 080 | 1693 | 1711 | GUGGGAAUCAAUUUUAGAU | 80 | AUCUAAAAUUGAUUCCCAC | 294 |
| 081 | 1694 | 1712 | UGGGAAUCAAUUUUAGAUG | 81 | CAUCUAAAAUUGAUUCCCA | 295 |
| 082 | 1695 | 1713 | GGGAAUCAAUUUUAGAUGG | 82 | CCAUCUAAAAUUGAUUCCC | 296 |
| 083 | 1696 | 1714 | GGAAUCAAUUUUAGAUGGU | 83 | ACCAUCUAAAAUUGAUUCC | 297 |
| 084 | 1697 | 1715 | GAAUCAAUUUUAGAUGGUC | 84 | GACCAUCUAAAAUUGAUUC | 298 |
| 085 | 1797 | 1815 | CAUCAUAUGAGCUAAUAUC | 85 | GAUAUUAGCUCAUAUGAUG | 299 |
| 086 | 1798 | 1816 | AUCAUAUGAGCUAAUAUCA | 86 | UGAUAUUAGCUCAUAUGAU | 300 |
| 087 | 1799 | 1817 | UCAUAUGAGCUAAUAUCAC | 87 | GUGAUAUUAGCUCAUAUGA | 301 |
| 088 | 1800 | 1818 | CAUAUGAGCUAAUAUCACA | 88 | UGUGAUAUUAGCUCAUAUG | 302 |
| 089 | 1801 | 1819 | AUAUGAGCUAAUAUCACAA | 89 | UUGUGAUAUUAGCUCAUAU | 303 |
| 090 | 1824 | 1842 | CCCAGUUUAAAAAACUAGU | 90 | ACUAGUUUUUUAAACUGGG | 304 |
| 091 | 1851 | 1869 | UAAAACUCUAAACUUGACU | 91 | AGUCAAGUUUAGAGUUUUA | 305 |
| 092 | 1852 | 1870 | AAAACUCUAAACUUGACUA | 92 | UAGUCAAGUUUAGAGUUUU | 306 |
| 093 | 1853 | 1871 | AAACUCUAAACUUGACUAA | 93 | UUAGUCAAGUUUAGAGUUU | 307 |
| 094 | 1855 | 1873 | ACUCUAAACUUGACUAAAU | 94 | AUUUAGUCAAGUUUAGAGU | 308 |
| 095 | 1856 | 1874 | CUCUAAACUUGACUAAAUA | 95 | UAUUUAGUCAAGUUUAGAG | 309 |
| 096 | 1936 | 1954 | GUCAGCACAGAGUAUGUGU | 96 | ACACAUACUCUGUGCUGAC | 310 |
| 097 | 2029 | 2047 | GAUUUAUUUAUGAAACCUA | 97 | UAGGUUUCAUAAAUAAAUC | 311 |
| 098 | 2034 | 2052 | AUUUAUGAAACCUAAUGAA | 98 | UUCAUUAGGUUUCAUAAAU | 312 |
| 099 | 2035 | 2053 | UUUAUGAAACCUAAUGAAG | 99 | CUUCAUUAGGUUUCAUAAA | 313 |
| 100 | 2037 | 2055 | UAUGAAACCUAAUGAAGCA | 100 | UGCUUCAUUAGGUUUCAUA | 314 |
| 101 | 2038 | 2056 | AUGAAACCUAAUGAAGCAG | 101 | CUGCUUCAUUAGGUUUCAU | 315 |
| 102 | 2110 | 2128 | UACUAAGUCACAUUGACUU | 102 | AAGUCAAUGUGACUUAGUA | 316 |
| 103 | 2111 | 2129 | ACUAAGUCACAUUGACUUU | 103 | AAAGUCAAUGUGACUUAGU | 317 |
| 104 | 2112 | 2130 | CUAAGUCACAUUGACUUUA | 104 | UAAAGUCAAUGUGACUUAG | 318 |
| 105 | 2113 | 2131 | UAAGUCACAUUGACUUUAA | 105 | UUAAAGUCAAUGUGACUUA | 319 |
| 106 | 2135 | 2153 | GAGGUAUCACUAUACCUUA | 106 | UAAGGUAUAGUGAUACCUC | 320 |
| 107 | 2196 | 2214 | CUUAAUACUAUGAAAACAA | 107 | UUGUUUUCAUAGUAUUAAG | 321 |
| 108 | 2267 | 2285 | CAUCGAGUUAAAGUUUAUA | 108 | UAUAAACUUUAACUCGAUG | 322 |
| 109 | 2268 | 2286 | AUCGAGUUAAAGUUUAUAU | 109 | AUAUAAACUUUAACUCGAU | 323 |
| 110 | 2269 | 2287 | UCGAGUUAAAGUUUAUAUU | 110 | AAUAUAAACUUUAACUCGA | 324 |
| 111 | 2270 | 2288 | CGAGUUAAAGUUUAUAUUU | 111 | AAAUAUAAACUUUAACUCG | 325 |
| 112 | 2277 | 2295 | AAGUUUAUAUUUCCCCUAA | 112 | UUAGGGGAAAUAUAAACUU | 326 |
| 113 | 2278 | 2296 | AGUUUAUAUUUCCCCUAAA | 113 | UUUAGGGGAAAUAUAAACU | 327 |
| 114 | 2285 | 2303 | AUUUCCCCUAAAUAUGCUG | 114 | CAGCAUAUUUAGGGGAAAU | 328 |
| 115 | 2489 | 2507 | CCCUAAAUCCCUAAAGAUU | 115 | AAUCUUUAGGGAUUUAGGG | 329 |
| 116 | 2490 | 2508 | CCUAAAUCCCUAAAGAUUA | 116 | UAAUCUUUAGGGAUUUAGG | 330 |
| 117 | 2491 | 2509 | CUAAAUCCCUAAAGAUUAG | 117 | CUAAUCUUUAGGGAUUUAG | 331 |
| 118 | 2492 | 2510 | UAAAUCCCUAAAGAUUAGA | 118 | UCUAAUCUUUAGGGAUUUA | 332 |
| 119 | 2493 | 2511 | AAAUCCCUAAAGAUUAGAU | 119 | AUCUAAUCUUUAGGGAUUU | 333 |
| 120 | 2593 | 2611 | UUAAACCCAUUUGUUAAAG | 120 | CUUUAACAAAUGGGUUUAA | 334 |
| 121 | 2602 | 2620 | UUUGUUAAAGGAUAUAGUG | 121 | CACUAUAUCCUUUAACAAA | 335 |
| 122 | 2603 | 2621 | UUGUUAAAGGAUAUAGUGC | 122 | GCACUAUAUCCUUUAACAA | 336 |
| 123 | 2604 | 2622 | UGUUAAAGGAUAUAGUGCC | 123 | GGCACUAUAUCCUUUAACA | 337 |
| 124 | 2605 | 2623 | GUUAAAGGAUAUAGUGCCC | 124 | GGGCACUAUAUCCUUUAAC | 338 |
| 125 | 2606 | 2624 | UUAAAGGAUAUAGUGCCCA | 125 | UGGGCACUAUAUCCUUUAA | 339 |
| 126 | 2607 | 2625 | UAAAGGAUAUAGUGCCCAA | 126 | UUGGGCACUAUAUCCUUUA | 340 |
| 127 | 2610 | 2628 | AGGAUAUAGUGCCCAAGUU | 127 | AACUUGGGCACUAUAUCCU | 341 |
| 128 | 2611 | 2629 | GGAUAUAGUGCCCAAGUUA | 128 | UAACUUGGGCACUAUAUCC | 342 |
| 129 | 2612 | 2630 | GAUAUAGUGCCCAAGUUAU | 129 | AUAACUUGGGCACUAUAUC | 343 |
| 130 | 2613 | 2631 | AUAUAGUGCCCAAGUUAUA | 130 | UAUAACUUGGGCACUAUAU | 344 |
| 131 | 2633 | 2651 | GGUGACCUACCUUUGUCAA | 131 | UUGACAAAGGUAGGUCACC | 345 |
| 132 | 2634 | 2652 | GUGACCUACCUUUGUCAAU | 132 | AUUGACAAAGGUAGGUCAC | 346 |
| 133 | 2635 | 2653 | UGACCUACCUUUGUCAAUA | 133 | UAUUGACAAAGGUAGGUCA | 347 |
| 134 | 2663 | 2681 | AUGUAUUUCAAAUUAUCCA | 134 | UGGAUAAUUUGAAAUACAU | 348 |
| 135 | 2669 | 2687 | UUCAAAUUAUCCAAUAUAC | 135 | GUAUAUUGGAUAAUUUGAA | 349 |
| 136 | 2670 | 2688 | UCAAAUUAUCCAAUAUACA | 136 | UGUAUAUUGGAUAAUUUGA | 350 |
| 137 | 2674 | 2692 | AUUAUCCAAUAUACAUGUC | 137 | GACAUGUAUAUUGGAUAAU | 351 |
| 138 | 2675 | 2693 | UUAUCCAAUAUACAUGUCA | 138 | UGACAUGUAUAUUGGAUAA | 352 |
| 139 | 2676 | 2694 | UAUCCAAUAUACAUGUCAU | 139 | AUGACAUGUAUAUUGGAUA | 353 |
| 140 | 2687 | 2705 | CAUGUCAUAUAUAUUUUUA | 140 | UAAAAAUAUAUAUGACAUG | 354 |
| 141 | 2772 | 2790 | AGUACAAAAUAAUAAAGGU | 141 | ACCUUUAUUAUUUUGUACU | 355 |
| 142 | 2773 | 2791 | GUACAAAAUAAUAAAGGUA | 142 | UACCUUUAUUAUUUUGUAC | 356 |
| 143 | 2802 | 2820 | AUAAUUUUCAGGACCACAG | 143 | CUGUGGUCCUGAAAAUUAU | 357 |
| 144 | 2804 | 2822 | AAUUUUCAGGACCACAGAC | 144 | GUCUGUGGUCCUGAAAAUU | 358 |
| 145 | 2806 | 2824 | UUUUCAGGACCACAGACUA | 145 | UAGUCUGUGGUCCUGAAAA | 359 |
| 146 | 2807 | 2825 | UUUCAGGACCACAGACUAA | 146 | UUAGUCUGUGGUCCUGAAA | 360 |
| 147 | 2808 | 2826 | UUCAGGACCACAGACUAAG | 147 | CUUAGUCUGUGGUCCUGAA | 361 |
| 148 | 2809 | 2827 | UCAGGACCACAGACUAAGC | 148 | GCUUAGUCUGUGGUCCUGA | 362 |
| 149 | 2811 | 2829 | AGGACCACAGACUAAGCUG | 149 | CAGCUUAGUCUGUGGUCCU | 363 |
| 150 | 2812 | 2830 | GGACCACAGACUAAGCUGU | 150 | ACAGCUUAGUCUGUGGUCC | 364 |
| 151 | 2813 | 2831 | GACCACAGACUAAGCUGUC | 151 | GACAGCUUAGUCUGUGGUC | 365 |
| 152 | 2847 | 2865 | UUUUUUAGGGCCAGAAUAC | 152 | GUAUUCUGGCCCUAAAAAA | 366 |
| 153 | 2848 | 2866 | UUUUUAGGGCCAGAAUACC | 153 | GGUAUUCUGGCCCUAAAAA | 367 |
| 154 | 2849 | 2867 | UUUUAGGGCCAGAAUACCA | 154 | UGGUAUUCUGGCCCUAAAA | 368 |
| 155 | 2850 | 2868 | UUUAGGGCCAGAAUACCAA | 155 | UUGGUAUUCUGGCCCUAAA | 369 |
| 156 | 2851 | 2869 | UUAGGGCCAGAAUACCAAA | 156 | UUUGGUAUUCUGGCCCUAA | 370 |
| 157 | 2852 | 2870 | UAGGGCCAGAAUACCAAAA | 157 | UUUUGGUAUUCUGGCCCUA | 371 |
| 158 | 2853 | 2871 | AGGGCCAGAAUACCAAAAU | 158 | AUUUUGGUAUUCUGGCCCU | 372 |
| 159 | 2890 | 2908 | AAAUUGGACAAUUUCAAAU | 159 | AUUUGAAAUUGUCCAAUUU | 373 |
| 160 | 2892 | 2910 | AUUGGACAAUUUCAAAUGC | 160 | GCAUUUGAAAUUGUCCAAU | 374 |
| 161 | 2893 | 2911 | UUGGACAAUUUCAAAUGCA | 161 | UGCAUUUGAAAUUGUCCAA | 375 |
| 162 | 2926 | 2944 | UUAAUAUAUGAGUUGCUUC | 162 | GAAGCAACUCAUAUAUUAA | 376 |
| 163 | 133 | 151 | GAAUUGAUCAAGACAAUUC | 163 | GAAUUGUCUUGAUCAAUUC | 377 |
| 164 | 134 | 152 | AAUUGAUCAAGACAAUUCA | 164 | UGAAUUGUCUUGAUCAAUU | 378 |
| 165 | 135 | 153 | AUUGAUCAAGACAAUUCAU | 165 | AUGAAUUGUCUUGAUCAAU | 379 |
| 166 | 136 | 154 | UUGAUCAAGACAAUUCAUC | 166 | GAUGAAUUGUCUUGAUCAA | 380 |
| 167 | 137 | 155 | UGAUCAAGACAAUUCAUCA | 167 | UGAUGAAUUGUCUUGAUCA | 381 |
| 168 | 138 | 156 | GAUCAAGACAAUUCAUCAU | 168 | AUGAUGAAUUGUCUUGAUC | 382 |
| 169 | 139 | 157 | AUCAAGACAAUUCAUCAUU | 169 | AAUGAUGAAUUGUCUUGAU | 383 |
| 170 | 140 | 158 | UCAAGACAAUUCAUCAUUU | 170 | AAAUGAUGAAUUGUCUUGA | 384 |
| 171 | 150 | 168 | UCAUCAUUUGAUUCUCUAU | 171 | AUAGAGAAUCAAAUGAUGA | 385 |
| 172 | 151 | 169 | CAUCAUUUGAUUCUCUAUC | 172 | GAUAGAGAAUCAAAUGAUG | 386 |
| 173 | 152 | 170 | AUCAUUUGAUUCUCUAUCU | 173 | AGAUAGAGAAUCAAAUGAU | 387 |
| 174 | 676 | 694 | UAGAAAAUCAGCUCAGAAG | 174 | CUUCUGAGCUGAUUUUCUA | 388 |
| 175 | 678 | 696 | GAAAAUCAGCUCAGAAGGA | 175 | UCCUUCUGAGCUGAUUUUC | 389 |
| 176 | 679 | 697 | AAAAUCAGCUCAGAAGGAC | 176 | GUCCUUCUGAGCUGAUUUU | 390 |
| 177 | 680 | 698 | AAAUCAGCUCAGAAGGACU | 177 | AGUCCUUCUGAGCUGAUUU | 391 |
| 178 | 681 | 699 | AAUCAGCUCAGAAGGACUA | 178 | UAGUCCUUCUGAGCUGAUU | 392 |
| 179 | 798 | 816 | GAUGGCAUUCCUGCUGAAU | 179 | AUUCAGCAGGAAUGCCAUC | 393 |
| 180 | 803 | 821 | CAUUCCUGCUGAAUGUACC | 180 | GGUACAUUCAGCAGGAAUG | 394 |
| 181 | 806 | 824 | UCCUGCUGAAUGUACCACC | 181 | GGUGGUACAUUCAGCAGGA | 395 |
| 182 | 808 | 826 | CUGCUGAAUGUACCACCAU | 182 | AUGGUGGUACAUUCAGCAG | 396 |
| 183 | 809 | 827 | UGCUGAAUGUACCACCAUU | 183 | AAUGGUGGUACAUUCAGCA | 397 |
| 184 | 810 | 828 | GCUGAAUGUACCACCAUUU | 184 | AAAUGGUGGUACAUUCAGC | 398 |
| 185 | 811 | 829 | CUGAAUGUACCACCAUUUA | 185 | UAAAUGGUGGUACAUUCAG | 399 |
| 186 | 834 | 852 | AGAGGUGAACAUACAAGUG | 186 | CACUUGUAUGUUCACCUCU | 400 |
| 187 | 835 | 853 | GAGGUGAACAUACAAGUGG | 187 | CCACUUGUAUGUUCACCUC | 401 |
| 188 | 836 | 854 | AGGUGAACAUACAAGUGGC | 188 | GCCACUUGUAUGUUCACCU | 402 |
| 189 | 837 | 855 | GGUGAACAUACAAGUGGCA | 189 | UGCCACUUGUAUGUUCACC | 403 |
| 190 | 848 | 866 | AAGUGGCAUGUAUGCCAUC | 190 | GAUGGCAUACAUGCCACUU | 404 |
| 191 | 849 | 867 | AGUGGCAUGUAUGCCAUCA | 191 | UGAUGGCAUACAUGCCACU | 405 |
| 192 | 850 | 868 | GUGGCAUGUAUGCCAUCAG | 192 | CUGAUGGCAUACAUGCCAC | 406 |
| 193 | 851 | 869 | UGGCAUGUAUGCCAUCAGA | 193 | UCUGAUGGCAUACAUGCCA | 407 |
| 194 | 1151 | 1169 | CUAUACGCUACAUCUAGUU | 194 | AACUAGAUGUAGCGUAUAG | 408 |
| 195 | 1243 | 1261 | CAAAAGGACACUUCAACUG | 195 | CAGUUGAAGUGUCCUUUUG | 409 |
| 196 | 1244 | 1262 | AAAAGGACACUUCAACUGU | 196 | ACAGUUGAAGUGUCCUUUU | 410 |
| 197 | 1245 | 1263 | AAAGGACACUUCAACUGUC | 197 | GACAGUUGAAGUGUCCUUU | 411 |
| 198 | 1246 | 1264 | AAGGACACUUCAACUGUCC | 198 | GGACAGUUGAAGUGUCCUU | 412 |
| 199 | 1247 | 1265 | AGGACACUUCAACUGUCCA | 199 | UGGACAGUUGAAGUGUCCU | 413 |
| 200 | 1248 | 1266 | GGACACUUCAACUGUCCAG | 200 | CUGGACAGUUGAAGUGUCC | 414 |
| 201 | 1261 | 1279 | GUCCAGAGGGUUAUUCAGG | 201 | CCUGAAUAACCCUCUGGAC | 415 |
| 202 | 1262 | 1280 | UCCAGAGGGUUAUUCAGGA | 202 | UCCUGAAUAACCCUCUGGA | 416 |
| 203 | 1263 | 1281 | CCAGAGGGUUAUUCAGGAG | 203 | CUCCUGAAUAACCCUCUGG | 417 |
| 204 | 1264 | 1282 | CAGAGGGUUAUUCAGGAGG | 204 | CCUCCUGAAUAACCCUCUG | 418 |
| 205 | 1265 | 1283 | AGAGGGUUAUUCAGGAGGC | 205 | GCCUCCUGAAUAACCCUCU | 419 |
| 206 | 1266 | 1284 | GAGGGUUAUUCAGGAGGCU | 206 | AGCCUCCUGAAUAACCCUC | 420 |
| 207 | 1267 | 1285 | AGGGUUAUUCAGGAGGCUG | 207 | CAGCCUCCUGAAUAACCCU | 421 |
| 208 | 1269 | 1287 | GGUUAUUCAGGAGGCUGGU | 208 | ACCAGCCUCCUGAAUAACC | 422 |
| 209 | 1367 | 1385 | AAGAGGAUUAUCUUGGAAG | 209 | CUUCCAAGAUAAUCCUCUU | 423 |
| 210 | 1368 | 1386 | AGAGGAUUAUCUUGGAAGU | 210 | ACUUCCAAGAUAAUCCUCU | 424 |
| 211 | 1369 | 1387 | GAGGAUUAUCUUGGAAGUC | 211 | GACUUCCAAGAUAAUCCUC | 425 |
| 212 | 143 | 163 | AGACAAUUCAUCAUUUGAU | 212 | GAAUCAAAUGAUGAAUUGUC | 426 |
| | | | UC | | U | |
| 213 | 143 | 162 | AGACAAUUCAUCAUUUGAU | 213 | AAUCAAAUGAUGAAUUGUCU | 427 |
| | | | U | | | |
| 214 | 144 | 163 | GACAAUUCAUCAUUUGAUU | 214 | GAAUCAAAUGAUGAAUUGUC | 428 |
| | | | C | | | |

### I.4 Nucleotide Modifications

[0150] A dsRNA of the present disclosure may comprise one or more modifications, e.g., to enhance cellular uptake, affinity for the target sequence, inhibitory activity, and/or stability. Modifications may include any modification known in the art, including, for example, end modifications, base modifications, sugar modifications/replacements, and backbone modifications. End modifications may include, for example, 5′ end modifications (e.g., phosphorylation, conjugation, and inverted linkages) and 3′ end modifications (e.g., conjugation, DNA nucleotides, and inverted linkages). Base modifications may include, e.g., replacement with stabilizing bases, destabilizing bases or bases that base-pair with an expanded repertoire of partners, removal of bases (abasic modifications of nucleotides), or conjugated bases. Sugar modifications or replacements may include, e.g., modifications at the 2′ or 4′ position of the sugar moiety, or replacement of the sugar moiety. Backbone modifications may include, for example, modification or replacement of the phosphodiester linkages, e.g., with one or more phosphorothioates, phosphorodithioates, phosphotriesters, methyl and other alkyl phosphonates, phosphinates, and phosphoramidates.

[0151] As used herein, the term “nucleotide” includes naturally occurring or modified nucleotide, or a surrogate replacement moiety. A modified nucleotide is a non-naturally occurring nucleotide and is also referred to herein as a “nucleotide analog.” One of ordinary skill in the art would understand that guanine, cytosine, adenine, uracil, or thymine in a nucleotide may be replaced by other moieties without substantially altering the base-pairing properties of the modified nucleotide. For example, a nucleotide comprising inosine as its base may base-pair with nucleotides containing adenine, cytosine, or uracil. Hence, nucleotides containing uracil, guanine, or adenine may be replaced in the nucleotide sequences of the present disclosure by a nucleotide containing, for example, inosine. Sequences comprising such replacement moieties are included as embodiments of the present disclosure. A modified nucleotide may also be a nucleotide whose ribose moiety is replaced with a non-ribose moiety.

[0152] The dsRNAs of the present disclosure may include one or more modified nucleotides known in the art, including, without limitation, 2′-O-methyl modified nucleotides, 2′-fluoro modified nucleotides, 2′-deoxy modified nucleotides, 2′-O-methoxyethyl modified nucleotides, modified nucleotides comprising alternate internucleotide linkages such as thiophosphates and phosphorothioates, phosphotriester modified nucleotides, modified nucleotides terminally linked to a cholesterol derivative or lipophilic moiety, peptide nucleic acids (PNAs; see, e.g., Nielsen et al., Science (1991) 254:1497-500), constrained ethyl (cEt) modified nucleotides, inverted deoxy modified nucleotides, inverted dideoxy modified nucleotides, locked nucleic acid modified nucleotides, abasic modifications of nucleotides, 2′-amino modified nucleotides, 2′-alkyl modified nucleotides, morpholino-modified nucleotides, phosphoramidate modified nucleotides, modified nucleotides comprising modifications at other sites of the sugar or base of an oligonucleotide, and non-natural base-containing modified nucleotides. In some embodiments, at least one of the one or more modified nucleotides is a 2′-O-methyl nucleotide, a 5′-phosphorothioate nucleotide, or a terminal nucleotide linked to a cholesterol derivative, lipophilic or other targeting moiety. The incorporation of 2′-O-methyl, 2′-O-ethyl, 2′-O-propryl, 2′-O-alkyl, 2′-O-aminoalkyl, or 2′-deoxy-2′-fluoro (i.e., 2′-fluoro) groups in nucleosides of an oligonucleotide may confer enhanced hybridization properties and/or enhanced nuclease stability to the oligonucleotide. Further, oligonucleotides containing phosphorothioate backbones (e.g., phosphorothioate linkage between two neighboring nucleotides at one or more positions of the dsRNA) may have enhanced nuclease stability. In some embodiments, the dsRNA may contain nucleotides with a modified ribose, such as locked nucleic acid (LNA) units.

[0153] In some embodiments, a dsRNA of the present disclosure comprises one or more 2′-O-methyl nucleotides and one or more 2′-fluoro nucleotides. In some embodiments, the dsRNA comprises two or more 2′-O-methyl nucleotides and two or more 2′-fluoro nucleotides. In some embodiments, the dsRNA comprises two or more 2′-O-methyl nucleotides (OMe) and two or more 2′-fluoro nucleotides (F) in an alternating pattern, e.g., the pattern OMe-F-OMe-F or the pattern F-OMe-F-OMe. In some embodiments, the dsRNA comprises up to 10 contiguous nucleotides that are each a 2′-O-methyl nucleotide. In some embodiments, the dsRNA comprises up to 10 contiguous nucleotides that are each a 2′-fluoro nucleotide. In some embodiments, the dsRNA comprises two or more 2′-fluoro nucleotides at the 5′ or 3′ end of the antisense strand.

[0154] In some embodiments, a dsRNA of the present disclosure comprises one or more phosphorothioate groups. In some embodiments, a dsRNA of the present disclosure comprises two or more, three or more, four or more, five or more, six or more, seven or more, eight or more, nine or more, or 10 or more phosphorothioate groups. In some embodiments, the dsRNA does not comprise any phosphorothioate group.

[0155] In some embodiments, the dsRNA comprises one or more phosphotriester groups. In some embodiments, the dsRNA comprises two or more, three or more, four or more, five or more, six or more, seven or more, eight or more, nine or more, or 10 or more phosphotriester groups. In some embodiments, the dsRNA does not comprise any phosphotriester group.

[0156] In some embodiments, the dsRNA comprises a modified ribonucleoside such as a deoxyribonucleoside, including, for example, deoxyribonucleoside overhang(s), and one or more deoxyribonucleosides within the double-stranded portion of a dsRNA. However, it is self-evident that under no circumstances is a double-stranded DNA molecule encompassed by the term “dsRNA.”

[0157] In some embodiments, the dsRNA comprises two or more, three or more, four or more, five or more, six or more, seven or more, eight or more, nine or more, or 10 or more different modified nucleotides described herein. In some embodiments, the dsRNA comprises up to two contiguous modified nucleotides, up to three contiguous modified nucleotides, up to four contiguous modified nucleotides, up to five contiguous modified nucleotides, up to six contiguous modified nucleotides, up to seven contiguous modified nucleotides, up to eight contiguous modified nucleotides, up to nine contiguous modified nucleotides, or up to 10 contiguous modified nucleotides. In some embodiments, the contiguous modified nucleotides are the same modified nucleotide. In some embodiments, the contiguous modified nucleotides are two or more, three or more, four or more, five or more, six or more, seven or more, eight or more, nine or more, or ten or more different modified nucleotides.

[0158] Table 2 below lists the sequences of exemplary siRNA constructs (CNST) with modified nucleotides. The start (ST) and end (ED) nucleotide positions in NM_014495.3 (SEQ ID NO: 1181) are indicated. Abbreviations are as follows: SEQ=SEQ ID NO; mX=2′-O-Me nucleotide; fX=2′-F nucleotide; dX=DNA nucleotide; invdX=inverted dX; PO=phosphodiester linkage; and Hy=hydroxyl group. In these constructs, the sequences of their sense strands and antisense strands correspond to the sense and antisense sequences of the constructs in Table 1 with the same construct numbers, but for the inclusion of (1) the modified nucleotides mX and fX, (2) “Hy” at the 5′ and 3′ ends of both strands, (3) mC-C-mA at the 5′ end of the sense strand nucleotide sequence, (4) invdT at the 3′ end of the sense strand nucleotide sequence, and (5) dT-dT at the 3′ end of the antisense strand nucleotide sequence. In these constructs, a base-pair of nucleotides may be modified differently in some embodiments, e.g., one nucleotide in the base-pair is a 2′-O-Me ribonucleotide and the other is a 2′-F nucleotide. In some embodiments, the antisense strand comprises two 2′-F nucleotides at its 5′ end.

TABLE 2
Sequences of Exemplary Modified siRNA Constructs

| CNST | | | | |
|---|---|---|---|---|
| # | Sense Sequence (5′-3′) | SEQ | Antisense Sequence (5′-3′) | SEQ |
| 001 | Hy-mC-PO-mC-PO-mA-PO-fU- | 429 | Hy-fG-PO-fA-PO-mC-PO- | 643 |
| | PO-mA-PO-fU-PO-mA-PO-fU- | | fU-PO-mU-PO-fC-PO-mU- | |
| | PO-mA-PO-fG-PO-mA-PO-fG- | | PO-fU-PO-mA-PO-fA-PO- | |
| | PO-mU-PO-fU-PO-mA-PO-fA- | | mC-PO-fU-PO-mC-PO-fU- | |
| | PO-mG-PO-fA-PO-mA-PO-fG- | | PO-mA-PO-fU-PO-mA-PO- | |
| | PO-mU-PO-fC-PO-invdT-Hy | | fU-PO-mA-PO-dT-PO-dT-Hy | |
| 002 | Hy-mC-PO-mC-PO-mA-PO-fA- | 430 | Hy-fA-PO-fG-PO-mA-PO- | 644 |
| | PO-mU-PO-fA-PO-mU-PO-fA- | | fC-PO-mU-PO-fU-PO-mC- | |
| | PO-mG-PO-fA-PO-mG-PO-fU- | | PO-fU-PO-mU-PO-fA-PO- | |
| | PO-mU-PO-fA-PO-mA-PO-fG- | | mA-PO-fC-PO-mU-PO-fC- | |
| | PO-mA-PO-fA-PO-mG-PO-fU- | | PO-mU-PO-fA-PO-mU-PO- | |
| | PO-mC-PO-fU-PO-invdT-Hy | | fA-PO-mU-PO-dT-PO-dT-Hy | |
| 003 | Hy-mC-PO-mC-PO-mA-PO-fU- | 431 | Hy-fU-PO-fA-PO-mG-PO- | 645 |
| | PO-mA-PO-fU-PO-mA-PO-fG- | | fA-PO-mC-PO-fU-PO-mU- | |
| | PO-mA-PO-fG-PO-mU-PO-fU- | | PO-fC-PO-mU-PO-fU-PO- | |
| | PO-mA-PO-fA-PO-mG-PO-fA- | | mA-PO-fA-PO-mC-PO-fU- | |
| | PO-mA-PO-fG-PO-mU-PO-fC- | | PO-mC-PO-fU-PO-mA-PO- | |
| | PO-mU-PO-fA-PO-invdT-Hy | | fU-PO-mA-PO-dT-PO-dT-Hy | |
| 004 | Hy-mC-PO-mC-PO-mA-PO-fA- | 432 | Hy-fA-PO-fG-PO-mA-PO- | 646 |
| | PO-mG-PO-fU-PO-mU-PO-fA- | | fC-PO-mC-PO-fU-PO-mA- | |
| | PO-mA-PO-fG-PO-mA-PO-fA- | | PO-fG-PO-mA-PO-fC-PO- | |
| | PO-mG-PO-fU-PO-mC-PO-fU- | | mU-PO-fU-PO-mC-PO-fU- | |
| | PO-mA-PO-fG-PO-mG-PO-fU- | | PO-mU-PO-fA-PO-mA-PO- | |
| | PO-mC-PO-fU-PO-invdT-Hy | | fC-PO-mU-PO-dT-PO-dT-Hy | |
| 005 | Hy-mC-PO-mC-PO-mA-PO-fG- | 433 | Hy-fC-PO-fA-PO-mG-PO- | 647 |
| | PO-mU-PO-fU-PO-mA-PO-fA- | | fA-PO-mC-PO-fC-PO-mU- | |
| | PO-mG-PO-fA-PO-mA-PO-fG- | | PO-fA-PO-mG-PO-fA-PO- | |
| | PO-mU-PO-fC-PO-mU-PO-fA- | | mC-PO-fU-PO-mU-PO-fC- | |
| | PO-mG-PO-fG-PO-mU-PO-fC- | | PO-mU-PO-fU-PO-mA-PO- | |
| | PO-mU-PO-fG-PO-invdT-Hy | | fA-PO-mC-PO-dT-PO-dT-Hy | |
| 006 | Hy-mC-PO-mC-PO-mA-PO-fU- | 434 | Hy-fG-PO-fC-PO-mA-PO- | 648 |
| | PO-mU-PO-fA-PO-mA-PO-fG- | | fG-PO-mA-PO-fC-PO-mC- | |
| | PO-mA-PO-fA-PO-mG-PO-fU- | | PO-fU-PO-mA-PO-fG-PO- | |
| | PO-mC-PO-fU-PO-mA-PO-fG- | | mA-PO-fC-PO-mU-PO-fU- | |
| | PO-mG-PO-fU-PO-mC-PO-fU- | | PO-mC-PO-fU-PO-mU-PO- | |
| | PO-mG-PO-fC-PO-invdT-Hy | | fA-PO-mA-PO-dT-PO-dT-Hy | |
| 007 | Hy-mC-PO-mC-PO-mA-PO-fU- | 435 | Hy-fA-PO-fG-PO-mC-PO- | 649 |
| | PO-mA-PO-fA-PO-mG-PO-fA- | | fA-PO-mG-PO-fA-PO-mC- | |
| | PO-mA-PO-fG-PO-mU-PO-fC- | | PO-fC-PO-mU-PO-fA-PO- | |
| | PO-mU-PO-fA-PO-mG-PO-fG- | | mG-PO-fA-PO-mC-PO-fU- | |
| | PO-mU-PO-fC-PO-mU-PO-fG- | | PO-mU-PO-fC-PO-mU-PO- | |
| | PO-mC-PO-fU-PO-invdT-Hy | | fU-PO-mA-PO-dT-PO-dT-Hy | |
| 008 | Hy-mC-PO-mC-PO-mA-PO-fA- | 436 | Hy-fA-PO-fA-PO-mG-PO- | 650 |
| | PO-mA-PO-fG-PO-mA-PO-fA- | | fC-PO-mA-PO-fG-PO-mA- | |
| | PO-mG-PO-fU-PO-mC-PO-fU- | | PO-fC-PO-mC-PO-fU-PO- | |
| | PO-mA-PO-fG-PO-mG-PO-fU- | | mA-PO-fG-PO-mA-PO-fC- | |
| | PO-mC-PO-fU-PO-mG-PO-fC- | | PO-mU-PO-fU-PO-mC-PO- | |
| | PO-mU-PO-fU-PO-invdT-Hy | | fU-PO-mU-PO-dT-PO-dT-Hy | |
| 009 | Hy-mC-PO-mC-PO-mA-PO-fA- | 437 | Hy-fG-PO-fA-PO-mA-PO- | 651 |
| | PO-mG-PO-fA-PO-mA-PO-fG- | | fG-PO-mC-PO-fA-PO-mG- | |
| | PO-mU-PO-fC-PO-mU-PO-fA- | | PO-fA-PO-mC-PO-fC-PO- | |
| | PO-mG-PO-fG-PO-mU-PO-fC- | | mU-PO-fA-PO-mG-PO-fA- | |
| | PO-mU-PO-fG-PO-mC-PO-fU- | | PO-mC-PO-fU-PO-mU-PO- | |
| | PO-mU-PO-fC-PO-invdT-Hy | | fC-PO-mU-PO-dT-PO-dT-Hy | |
| 010 | Hy-mC-PO-mC-PO-mA-PO-fG- | 438 | Hy-fG-PO-fG-PO-mA-PO- | 652 |
| | PO-mA-PO-fA-PO-mG-PO-fU- | | fA-PO-mG-PO-fC-PO-mA- | |
| | PO-mC-PO-fU-PO-mA-PO-fG- | | PO-fG-PO-mA-PO-fC-PO- | |
| | PO-mG-PO-fU-PO-mC-PO-fU- | | mC-PO-fU-PO-mA-PO-fG- | |
| | PO-mG-PO-fC-PO-mU-PO-fU- | | PO-mA-PO-fC-PO-mU-PO- | |
| | PO-mC-PO-fC-PO-invdT-Hy | | fU-PO-mC-PO-dT-PO-dT-Hy | |
| 011 | Hy-mC-PO-mC-PO-mA-PO-fA- | 439 | Hy-fU-PO-fG-PO-mG-PO- | 653 |
| | PO-mA-PO-fG-PO-mU-PO-fC- | | fA-PO-mA-PO-fG-PO-mC- | |
| | PO-mU-PO-fA-PO-mG-PO-fG- | | PO-fA-PO-mG-PO-fA-PO- | |
| | PO-mU-PO-fC-PO-mU-PO-fG- | | mC-PO-fC-PO-mU-PO-fA- | |
| | PO-mC-PO-fU-PO-mU-PO-fC- | | PO-mG-PO-fA-PO-mC-PO- | |
| | PO-mC-PO-fA-PO-invdT-Hy | | fU-PO-mU-PO-dT-PO-dT-Hy | |
| 012 | Hy-mC-PO-mC-PO-mA-PO-fC- | 440 | Hy-fC-PO-fA-PO-mA-PO- | 654 |
| | PO-mA-PO-fA-PO-mG-PO-fA- | | fA-PO-mU-PO-fG-PO-mA- | |
| | PO-mC-PO-fA-PO-mA-PO-fU- | | PO-fU-PO-mG-PO-fA-PO- | |
| | PO-mU-PO-fC-PO-mA-PO-fU- | | mA-PO-fU-PO-mU-PO-fG- | |
| | PO-mC-PO-fA-PO-mU-PO-fU- | | PO-mU-PO-fC-PO-mU-PO- | |
| | PO-mU-PO-fG-PO-invdT-Hy | | fU-PO-mG-PO-dT-PO-dT-Hy | |
| 013 | Hy-mC-PO-mC-PO-mA-PO-fA- | 441 | Hy-fA-PO-fU-PO-mC-PO- | 655 |
| | PO-mG-PO-fA-PO-mC-PO-fA- | | fA-PO-mA-PO-fA-PO-mU- | |
| | PO-mA-PO-fU-PO-mU-PO-fC- | | PO-fG-PO-mA-PO-fU-PO- | |
| | PO-mA-PO-fU-PO-mC-PO-fA- | | mG-PO-fA-PO-mA-PO-fU- | |
| | PO-mU-PO-fU-PO-mU-PO-fG- | | PO-mU-PO-fG-PO-mU-PO- | |
| | PO-mA-PO-fU-PO-invdT-Hy | | fC-PO-mU-PO-dT-PO-dT-Hy | |
| 014 | Hy-mC-PO-mC-PO-mA-PO-fG- | 442 | Hy-fA-PO-fA-PO-mU-PO- | 656 |
| | PO-mA-PO-fC-PO-mA-PO-fA- | | fC-PO-mA-PO-fA-PO-mA- | |
| | PO-mU-PO-fU-PO-mC-PO-fA- | | PO-fU-PO-mG-PO-fA-PO- | |
| | PO-mU-PO-fC-PO-mA-PO-fU- | | mU-PO-fG-PO-mA-PO-fA- | |
| | PO-mU-PO-fU-PO-mG-PO-fA- | | PO-mU-PO-fU-PO-mG-PO- | |
| | PO-mU-PO-fU-PO-invdT-Hy | | fU-PO-mC-PO-dT-PO-dT-Hy | |
| 015 | Hy-mC-PO-mC-PO-mA-PO-fA- | 443 | Hy-fG-PO-fA-PO-mA-PO- | 657 |
| | PO-mC-PO-fA-PO-mA-PO-fU- | | fU-PO-mC-PO-fA-PO-mA- | |
| | PO-mU-PO-fC-PO-mA-PO-fU- | | PO-fA-PO-mU-PO-fG-PO- | |
| | PO-mC-PO-fA-PO-mU-PO-fU- | | mA-PO-fU-PO-mG-PO-fA- | |
| | PO-mU-PO-fG-PO-mA-PO-fU- | | PO-mA-PO-fU-PO-mU-PO- | |
| | PO-mU-PO-fC-PO-invdT-Hy | | fG-PO-mU-PO-dT-PO-dT-Hy | |
| 016 | Hy-mC-PO-mC-PO-mA-PO-fG- | 444 | Hy-fU-PO-fG-PO-mG-PO- | 658 |
| | PO-mC-PO-fA-PO-mU-PO-fC- | | fA-PO-mG-PO-fA-PO-mA- | |
| | PO-mA-PO-fA-PO-mA-PO-fG- | | PO-fG-PO-mG-PO-fU-PO- | |
| | PO-mA-PO-fC-PO-mC-PO-fU- | | mC-PO-fU-PO-mU-PO-fU- | |
| | PO-mU-PO-fC-PO-mU-PO-fC- | | PO-mG-PO-fA-PO-mU-PO- | |
| | PO-mC-PO-fA-PO-invdT-Hy | | fG-PO-mC-PO-dT-PO-dT-Hy | |
| 017 | Hy-mC-PO-mC-PO-mA-PO-fA- | 445 | Hy-fG-PO-fC-PO-mU-PO- | 659 |
| | PO-mU-PO-fU-PO-mU-PO-fC- | | fU-PO-mG-PO-fG-PO-mA- | |
| | PO-mU-PO-fC-PO-mU-PO-fA- | | PO-fA-PO-mG-PO-fA-PO- | |
| | PO-mU-PO-fC-PO-mU-PO-fU- | | mU-PO-fA-PO-mG-PO-fA- | |
| | PO-mC-PO-fC-PO-mA-PO-fA- | | PO-mG-PO-fA-PO-mA-PO- | |
| | PO-mG-PO-fC-PO-invdT-Hy | | fA-PO-mU-PO-dT-PO-dT-Hy | |
| 018 | Hy-mC-PO-mC-PO-mA-PO-fU- | 446 | Hy-fU-PO-fU-PO-mG-PO- | 660 |
| | PO-mC-PO-fU-PO-mC-PO-fU- | | fG-PO-mC-PO-fU-PO-mU- | |
| | PO-mA-PO-fU-PO-mC-PO-fU- | | PO-fG-PO-mG-PO-fA-PO- | |
| | PO-mU-PO-fC-PO-mC-PO-fA- | | mA-PO-fG-PO-mA-PO-fU- | |
| | PO-mA-PO-fG-PO-mC-PO-fC- | | PO-mA-PO-fG-PO-mA-PO- | |
| | PO-mA-PO-fA-PO-invdT-Hy | | fG-PO-mA-PO-dT-PO-dT-Hy | |
| 019 | Hy-mC-PO-mC-PO-mA-PO-fC- | 447 | Hy-fC-PO-fU-PO-mU-PO- | 661 |
| | PO-mU-PO-fC-PO-mU-PO-fA- | | fG-PO-mG-PO-fC-PO-mU- | |
| | PO-mU-PO-fC-PO-mU-PO-fU- | | PO-fU-PO-mG-PO-fG-PO- | |
| | PO-mC-PO-fC-PO-mA-PO-fA- | | mA-PO-fA-PO-mG-PO-fA- | |
| | PO-mG-PO-fC-PO-mC-PO-fA- | | PO-mU-PO-fA-PO-mG-PO- | |
| | PO-mA-PO-fG-PO-invdT-Hy | | fA-PO-mG-PO-dT-PO-dT-Hy | |
| 020 | Hy-mC-PO-mC-PO-mA-PO-fU- | 448 | Hy-fU-PO-fC-PO-mU-PO- | 662 |
| | PO-mC-PO-fU-PO-mA-PO-fU- | | fU-PO-mG-PO-fG-PO-mC- | |
| | PO-mC-PO-fU-PO-mU-PO-fC- | | PO-fU-PO-mU-PO-fG-PO- | |
| | PO-mC-PO-fA-PO-mA-PO-fG- | | mG-PO-fA-PO-mA-PO-fG- | |
| | PO-mC-PO-fC-PO-mA-PO-fA- | | PO-mA-PO-fU-PO-mA-PO- | |
| | PO-mG-PO-fA-PO-invdT-Hy | | fG-PO-mA-PO-dT-PO-dT-Hy | |
| 021 | Hy-mC-PO-mC-PO-mA-PO-fC- | 449 | Hy-fC-PO-fU-PO-mC-PO- | 663 |
| | PO-mU-PO-fA-PO-mU-PO-fC- | | fU-PO-mU-PO-fG-PO-mG- | |
| | PO-mU-PO-fU-PO-mC-PO-fC- | | PO-fC-PO-mU-PO-fU-PO- | |
| | PO-mA-PO-fA-PO-mG-PO-fC- | | mG-PO-fG-PO-mA-PO-fA- | |
| | PO-mC-PO-fA-PO-mA-PO-fG- | | PO-mG-PO-fA-PO-mU-PO- | |
| | PO-mA-PO-fG-PO-invdT-Hy | | fA-PO-mG-PO-dT-PO-dT-Hy | |
| 022 | Hy-mC-PO-mC-PO-mA-PO-fC- | 450 | Hy-fA-PO-fG-PO-mA-PO- | 664 |
| | PO-mA-PO-fA-PO-mG-PO-fA- | | fA-PO-mA-PO-fG-PO-mG- | |
| | PO-mA-PO-fC-PO-mU-PO-fA- | | PO-fG-PO-mA-PO-fG-PO- | |
| | PO-mC-PO-fU-PO-mC-PO-fC- | | mU-PO-fA-PO-mG-PO-fU- | |
| | PO-mC-PO-fU-PO-mU-PO-fU- | | PO-mU-PO-fC-PO-mU-PO- | |
| | PO-mC-PO-fU-PO-invdT-Hy | | fU-PO-mG-PO-dT-PO-dT-Hy | |
| 023 | Hy-mC-PO-mC-PO-mA-PO-fA- | 451 | Hy-fG-PO-fA-PO-mA-PO- | 665 |
| | PO-mG-PO-fA-PO-mA-PO-fC- | | fG-PO-mA-PO-fA-PO-mA- | |
| | PO-mU-PO-fA-PO-mC-PO-fU- | | PO-fG-PO-mG-PO-fG-PO- | |
| | PO-mC-PO-fC-PO-mC-PO-fU- | | mA-PO-fG-PO-mU-PO-A- | |
| | PO-mU-PO-fU-PO-mC-PO-fU- | | PO-mG-PO-fU-PO-mU-PO- | |
| | PO-mU-PO-fC-PO-invdT-Hy | | fC-PO-mU-PO-dT-PO-dT-Hy | |
| 024 | Hy-mC-PO-mC-PO-mA-PO-fG- | 452 | Hy-fU-PO-fG-PO-mA-PO- | 666 |
| | PO-mA-PO-fA-PO-mC-PO-fU- | | fA-PO-mG-PO-fA-PO-mA- | |
| | PO-mA-PO-fC-PO-mU-PO-fC- | | PO-fA-PO-mG-PO-fG-PO- | |
| | PO-mC-PO-fC-PO-mU-PO-fU- | | mG-PO-fA-PO-mG-PO-fU- | |
| | PO-mU-PO-fC-PO-mU-PO-fU- | | PO-mA-PO-fG-PO-mU-PO- | |
| | PO-mC-PO-fA-PO-invdT-Hy | | fU-PO-mC-PO-dT-PO-dT-Hy | |
| 025 | Hy-mC-PO-mC-PO-mA-PO-fA- | 453 | Hy-fC-PO-fU-PO-mG-PO- | 667 |
| | PO-mA-PO-fC-PO-mU-PO-fA- | | fA-PO-mA-PO-fG-PO-mA- | |
| | PO-mC-PO-fU-PO-mC-PO-fC- | | PO-fA-PO-mA-PO-fG-PO- | |
| | PO-mC-PO-fU-PO-mU-PO-fU- | | mG-PO-fG-PO-mA-PO-fG- | |
| | PO-mC-PO-fU-PO-mU-PO-fC- | | PO-mU-PO-fA-PO-mG-PO- | |
| | PO-mA-PO-fG-PO-invdT-Hy | | fU-PO-mU-PO-dT-PO-dT-Hy | |
| 026 | Hy-mC-PO-mC-PO-mA-PO-fA- | 454 | Hy-fG-PO-fC-PO-mC-PO- | 668 |
| | PO-mA-PO-fA-PO-mU-PO-fG- | | fA-PO-mU-PO-fC-PO-mA- | |
| | PO-mU-PO-fA-PO-mA-PO-fA- | | PO-fU-PO-mG-PO-fU-PO- | |
| | PO-mA-PO-fC-PO-mA-PO-fU- | | mU-PO-fU-PO-mU-PO-fA- | |
| | PO-mG-PO-fA-PO-mU-PO-fG- | | PO-mC-PO-fA-PO-mU-PO- | |
| | PO-mG-PO-fC-PO-invdT-Hy | | fU-PO-mU-PO-dT-PO-dT-Hy | |
| 027 | Hy-mC-PO-mC-PO-mA-PO-fA- | 455 | Hy-fU-PO-fG-PO-mC-PO- | 669 |
| | PO-mA-PO-fU-PO-mG-PO-fU- | | fC-PO-mA-PO-fU-PO-mC- | |
| | PO-mA-PO-fA-PO-mA-PO-fA- | | PO-fA-PO-mU-PO-fG-PO- | |
| | PO-mC-PO-fA-PO-mU-PO-fG- | | mU-PO-fU-PO-mU-PO-fU- | |
| | PO-mA-PO-fU-PO-mG-PO-fG- | | PO-mA-PO-fC-PO-mA-PO- | |
| | PO-mC-PO-fA-PO-invdT-Hy | | fU-PO-mU-PO-dT-PO-dT-Hy | |
| 028 | Hy-mC-PO-mC-PO-mA-PO-fU- | 456 | Hy-fG-PO-fG-PO-mA-PO- | 670 |
| | PO-mA-PO-fA-PO-mA-PO-fA- | | fA-PO-mU-PO-fG-PO-mC- | |
| | PO-mC-PO-fA-PO-mU-PO-fG- | | PO-fC-PO-mA-PO-fU-PO- | |
| | PO-mA-PO-fU-PO-mG-PO-fG- | | mC-PO-fA-PO-mU-PO-fG- | |
| | PO-mC-PO-fA-PO-mU-PO-fU- | | PO-mU-PO-fU-PO-mU-PO- | |
| | PO-mC-PO-fC-PO-invdT-Hy | | fU-PO-mA-PO-dT-PO-dT-Hy | |
| 029 | Hy-mC-PO-mC-PO-mA-PO-fU- | 457 | Hy-fA-PO-fU-PO-mC-PO- | 671 |
| | PO-mU-PO-fU-PO-mU-PO-fC- | | fA-PO-mC-PO-fA-PO-mG- | |
| | PO-mA-PO-fU-PO-mG-PO-fU- | | PO-fU-PO-mA-PO-fG-PO- | |
| | PO-mC-PO-fU-PO-mA-PO-fC- | | mA-PO-fC-PO-mA-PO-fU- | |
| | PO-mU-PO-fG-PO-mU-PO-fG- | | PO-mG-PO-fA-PO-mA-PO- | |
| | PO-mA-PO-fU-PO-invdT-Hy | | fA-PO-mA-PO-dT-PO-dT-Hy | |
| 030 | Hy-mC-PO-mC-PO-mA-PO-fU- | 458 | Hy-fC-PO-fA-PO-mU-PO- | 672 |
| | PO-mU-PO-fU-PO-mC-PO-fA- | | fC-PO-mA-PO-fC-PO-mA- | |
| | PO-mU-PO-fG-PO-mU-PO-fC- | | PO-fG-PO-mU-PO-fA-PO- | |
| | PO-mU-PO-fA-PO-mC-PO-fU- | | mG-PO-fA-PO-mC-PO-fA- | |
| | PO-mG-PO-fU-PO-mG-PO-fA- | | PO-mU-PO-fG-PO-mA-PO- | |
| | PO-mU-PO-fG-PO-invdT-Hy | | fA-PO-mA-PO-dT-PO-dT-Hy | |
| 031 | Hy-mC-PO-mC-PO-mA-PO-fU- | 459 | Hy-fA-PO-fA-PO-mC-PO- | 673 |
| | PO-mC-PO-fA-PO-mU-PO-fG- | | fA-PO-mU-PO-fC-PO-mA- | |
| | PO-mU-PO-fC-PO-mU-PO-fA- | | PO-fC-PO-mA-PO-fG-PO- | |
| | PO-mC-PO-fU-PO-mG-PO-fU- | | mU-PO-fA-PO-mG-PO-fA- | |
| | PO-mG-PO-fA-PO-mU-PO-fG- | | PO-mC-PO-fA-PO-mU-PO- | |
| | PO-mU-PO-fU-PO-invdT-Hy | | fG-PO-mA-PO-dT-PO-dT-Hy | |
| 032 | Hy-mC-PO-mC-PO-mA-PO-fG- | 460 | Hy-fC-PO-fC-PO-mA-PO- | 674 |
| | PO-mU-PO-fU-PO-mU-PO-fU- | | fA-PO-mC-PO-fU-PO-mC- | |
| | PO-mA-PO-fC-PO-mG-PO-fA- | | PO-fA-PO-mA-PO-fU-PO- | |
| | PO-mA-PO-fU-PO-mU-PO-fG- | | mU-PO-fC-PO-mG-PO-fU- | |
| | PO-mA-PO-fG-PO-mU-PO-fU- | | PO-mA-PO-fA-PO-mA-PO- | |
| | PO-mG-PO-fG-PO-invdT-Hy | | fA-PO-mC-PO-dT-PO-dT-Hy | |
| 033 | Hy-mC-PO-mC-PO-mA-PO-fU- | 461 | Hy-fU-PO-fC-PO-mC-PO- | 675 |
| | PO-mU-PO-fU-PO-mU-PO-fA- | | fA-PO-mA-PO-fC-PO-mU- | |
| | PO-mC-PO-fG-PO-mA-PO-fA- | | PO-fC-PO-mA-PO-fA-PO- | |
| | PO-mU-PO-fU-PO-mG-PO-fA- | | mU-PO-fU-PO-mC-PO-fG- | |
| | PO-mG-PO-fU-PO-mU-PO-fG- | | PO-mU-PO-fA-PO-mA-PO- | |
| | PO-mG-PO-fA-PO-invdT-Hy | | fA-PO-mA-PO-dT-PO-dT-Hy | |
| 034 | Hy-mC-PO-mC-PO-mA-PO-fC- | 462 | Hy-fU-PO-fA-PO-mG-PO- | 676 |
| | PO-mG-PO-fA-PO-mA-PO-fA- | | fC-PO-mG-PO-fU-PO-mA- | |
| | PO-mC-PO-fC-PO-mA-PO-fA- | | PO-fU-PO-mA-PO-fG-PO- | |
| | PO-mC-PO-fU-PO-mA-PO-fU- | | mU-PO-fU-PO-mG-PO-fG- | |
| | PO-mA-PO-fC-PO-mG-PO-fC- | | PO-mU-PO-fU-PO-mU-PO- | |
| | PO-mU-PO-fA-PO-invdT-Hy | | fC-PO-mG-PO-dT-PO-dT-Hy | |
| 035 | Hy-mC-PO-mC-PO-mA-PO-fG- | 463 | Hy-fG-PO-fU-PO-mA-PO- | 677 |
| | PO-mA-PO-fA-PO-mA-PO-fC- | | fG-PO-mC-PO-fG-PO-mU- | |
| | PO-mC-PO-fA-PO-mA-PO-fC- | | PO-fA-PO-mU-PO-fA-PO- | |
| | PO-mU-PO-fA-PO-mU-PO-fA- | | mG-PO-fU-PO-mU-PO-fG- | |
| | PO-mC-PO-fG-PO-mC-PO-fU- | | PO-mG-PO-fU-PO-mU-PO- | |
| | PO-mA-PO-fC-PO-invdT-Hy | | fU-PO-mC-PO-dT-PO-dT-Hy | |
| 036 | Hy-mC-PO-mC-PO-mA-PO-fA- | 464 | Hy-fU-PO-fG-PO-mU-PO- | 678 |
| | PO-mA-PO-fA-PO-mC-PO-fC- | | fA-PO-mG-PO-fC-PO-mG- | |
| | PO-mA-PO-fA-PO-mC-PO-fU- | | PO-fU-PO-mA-PO-fU-PO- | |
| | PO-mA-PO-fU-PO-mA-PO-fC- | | mA-PO-fG-PO-mU-PO-fU- | |
| | PO-mG-PO-fC-PO-mU-PO-fA- | | PO-mG-PO-fG-PO-mU-PO- | |
| | PO-mC-PO-fA-PO-invdT-Hy | | fU-PO-mU-PO-dT-PO-dT-Hy | |
| 037 | Hy-mC-PO-mC-PO-mA-PO-fA- | 465 | Hy-fA-PO-fU-PO-mG-PO- | 679 |
| | PO-mA-PO-fC-PO-mC-PO-fA- | | fU-PO-mA-PO-fG-PO-mC- | |
| | PO-mA-PO-fC-PO-mU-PO-fA- | | PO-fG-PO-mU-PO-fA-PO- | |
| | PO-mU-PO-fA-PO-mC-PO-fG- | | mU-PO-fA-PO-mG-PO-fU- | |
| | PO-mC-PO-fU-PO-mA-PO-fC- | | PO-mU-PO-fG-PO-mG-PO- | |
| | PO-mA-PO-fU-PO-invdT-Hy | | fU-PO-mU-PO-dT-PO-dT-Hy | |
| 038 | Hy-mC-PO-mC-PO-mA-PO-fU- | 466 | Hy-fG-PO-fU-PO-mG-PO- | 680 |
| | PO-mC-PO-fA-PO-mC-PO-fA- | | fU-PO-mC-PO-fC-PO-mU- | |
| | PO-mA-PO-fA-PO-mG-PO-fC- | | PO-fU-PO-mU-PO-fU-PO- | |
| | PO-mA-PO-fA-PO-mA-PO-fA- | | mG-PO-fC-PO-mU-PO-fU- | |
| | PO-mG-PO-fG-PO-mA-PO-fC- | | PO-mU-PO-fG-PO-mU-PO- | |
| | PO-mA-PO-fC-PO-invdT-Hy | | fG-PO-mA-PO-dT-PO-dT-Hy | |
| 039 | Hy-mC-PO-mC-PO-mA-PO-fG- | 467 | Hy-fC-PO-fA-PO-mC-PO- | 681 |
| | PO-mU-PO-fU-PO-mA-PO-fU- | | fC-PO-mA-PO-fG-PO-mC- | |
| | PO-mU-PO-fC-PO-mA-PO-fG- | | PO-fC-PO-mU-PO-fC-PO- | |
| | PO-mG-PO-fA-PO-mG-PO-fG- | | mC-PO-fU-PO-mG-PO-fA- | |
| | PO-mC-PO-fU-PO-mG-PO-fG- | | PO-mA-PO-fU-PO-mA-PO- | |
| | PO-mU-PO-fG-PO-invdT-Hy | | fA-PO-mC-PO-dT-PO-dT-Hy | |
| 040 | Hy-mC-PO-mC-PO-mA-PO-fU- | 468 | Hy-fC-PO-fC-PO-mA-PO- | 682 |
| | PO-mU-PO-fA-PO-mU-PO-fU- | | fC-PO-mC-PO-fA-PO-mG- | |
| | PO-mC-PO-fA-PO-mG-PO-fG- | | PO-fC-PO-mC-PO-fU-PO- | |
| | PO-mA-PO-fG-PO-mG-PO-fC- | | mC-PO-fC-PO-mU-PO-fG- | |
| | PO-mU-PO-fG-PO-mG-PO-fU- | | PO-mA-PO-fA-PO-mU-PO- | |
| | PO-mG-PO-fG-PO-invdT-Hy | | fA-PO-mA-PO-dT-PO-dT-Hy | |
| 041 | Hy-mC-PO-mC-PO-mA-PO-fU- | 469 | Hy-fA-PO-fC-PO-mC-PO- | 683 |
| | PO-mA-PO-fU-PO-mU-PO-fC- | | fA-PO-mC-PO-fC-PO-mA- | |
| | PO-mA-PO-fG-PO-mG-PO-fA- | | PO-fG-PO-mC-PO-fC-PO- | |
| | PO-mG-PO-fG-PO-mC-PO-fU- | | mU-PO-fC-PO-mC-PO-fU- | |
| | PO-mG-PO-fG-PO-mU-PO-fG- | | PO-mG-PO-fA-PO-mA-PO- | |
| | PO-mG-PO-fU-PO-invdT-Hy | | fU-PO-mA-PO-dT-PO-dT-Hy | |
| 042 | Hy-mC-PO-mC-PO-mA-PO-fC- | 470 | Hy-fC-PO-fA-PO-mC-PO- | 684 |
| | PO-mU-PO-fC-PO-mA-PO-fU- | | fA-PO-mU-PO-fU-PO-mA- | |
| | PO-mU-PO-fC-PO-mC-PO-fA- | | PO-fA-PO-mC-PO-fU-PO- | |
| | PO-mA-PO-fG-PO-mU-PO-fU- | | mU-PO-fG-PO-mG-PO-fA- | |
| | PO-mA-PO-fA-PO-mU-PO-fG- | | PO-mA-PO-fU-PO-mG-PO- | |
| | PO-mU-PO-fG-PO-invdT-Hy | | fA-PO-mG-PO-dT-PO-dT-Hy | |
| 043 | Hy-mC-PO-mC-PO-mA-PO-fU- | 471 | Hy-fC-PO-fC-PO-mA-PO- | 685 |
| | PO-mC-PO-fA-PO-mU-PO-fU- | | fC-PO-mA-PO-fU-PO-mU- | |
| | PO-mC-PO-fC-PO-mA-PO-fA- | | PO-fA-PO-mA-PO-fC-PO- | |
| | PO-mG-PO-fU-PO-mU-PO-fA- | | mU-PO-fU-PO-mG-PO-fG- | |
| | PO-mA-PO-fU-PO-mG-PO-fU- | | PO-mA-PO-fA-PO-mU-PO- | |
| | PO-mG-PO-fG-PO-invdT-Hy | | fG-PO-mA-PO-dT-PO-dT-Hy | |
| 044 | Hy-mC-PO-mC-PO-mA-PO-fC- | 472 | Hy-fA-PO-fC-PO-mC-PO- | 686 |
| | PO-mA-PO-fU-PO-mU-PO-fC- | | fA-PO-mC-PO-fA-PO-mU- | |
| | PO-mC-PO-fA-PO-mA-PO-fG- | | PO-fU-PO-mA-PO-fA-PO- | |
| | PO-mU-PO-fU-PO-mA-PO-fA- | | mC-PO-fU-PO-mU-PO-fG- | |
| | PO-mU-PO-fG-PO-mU-PO-fG- | | PO-mG-PO-fA-PO-mA-PO- | |
| | PO-mG-PO-fU-PO-invdT-Hy | | fU-PO-mG-PO-dT-PO-dT-Hy | |
| 045 | Hy-mC-PO-mC-PO-mA-PO-fU- | 473 | Hy-fA-PO-fU-PO-mU-PO- | 687 |
| | PO-mA-PO-fA-PO-mU-PO-fA- | | fU-PO-mA-PO-fA-PO-mU- | |
| | PO-mA-PO-fU-PO-mC-PO-fU- | | PO-fA-PO-mC-PO-fC-PO- | |
| | PO-mG-PO-fG-PO-mU-PO-fA- | | mA-PO-fG-PO-mA-PO-fU- | |
| | PO-mU-PO-fU-PO-mA-PO-fA- | | PO-mU-PO-fA-PO-mU-PO- | |
| | PO-mA-PO-fU-PO-invdT-Hy | | fU-PO-mA-PO-dT-PO-dT-Hy | |
| 046 | Hy-mC-PO-mC-PO-mA-PO-fA- | 474 | Hy-fG-PO-fA-PO-mU-PO- | 688 |
| | PO-mA-PO-fU-PO-mA-PO-fA- | | fU-PO-mU-PO-fA-PO-mA- | |
| | PO-mU-PO-fC-PO-mU-PO-fG- | | PO-fU-PO-mA-PO-fC-PO- | |
| | PO-mG-PO-fU-PO-mA-PO-fU- | | mC-PO-fA-PO-mG-PO-fA- | |
| | PO-mU-PO-fA-PO-mA-PO-fA- | | PO-mU-PO-fU-PO-mA-PO- | |
| | PO-mU-PO-fC-PO-invdT-Hy | | fU-PO-mU-PO-dT-PO-dT-Hy | |
| 047 | Hy-mC-PO-mC-PO-mA-PO-fU- | 475 | Hy-fA-PO-fG-PO-mG-PO- | 689 |
| | PO-mA-PO-fA-PO-mU-PO-fC- | | fA-PO-mU-PO-fU-PO-mU- | |
| | PO-mU-PO-fG-PO-mG-PO-fU- | | PO-fA-PO-mA-PO-fU-PO- | |
| | PO-mA-PO-fU-PO-mU-PO-fA- | | mA-PO-fC-PO-mC-PO-fA- | |
| | PO-mA-PO-fA-PO-mU-PO-fC- | | PO-mG-PO-fA-PO-mU-PO- | |
| | PO-mC-PO-fU-PO-invdT-Hy | | fU-PO-mA-PO-dT-PO-dT-Hy | |
| 048 | Hy-mC-PO-mC-PO-mA-PO-fA- | 476 | Hy-fU-PO-fA-PO-mA-PO- | 690 |
| | PO-mU-PO-fC-PO-mU-PO-fG- | | fG-PO-mG-PO-fA-PO-mU- | |
| | PO-mG-PO-fU-PO-mA-PO-fU- | | PO-fU-PO-mU-PO-fA-PO- | |
| | PO-mU-PO-fA-PO-mA-PO-fA- | | mA-PO-fU-PO-mA-PO-fC- | |
| | PO-mU-PO-fC-PO-mC-PO-fU- | | PO-mC-PO-fA-PO-mG-PO- | |
| | PO-mU-PO-fA-PO-invdT-Hy | | fA-PO-mU-PO-dT-PO-dT-Hy | |
| 049 | Hy-mC-PO-mC-PO-mA-PO-fC- | 477 | Hy-fC-PO-fU-PO-mU-PO- | 691 |
| | PO-mU-PO-fG-PO-mG-PO-fU- | | fA-PO-mA-PO-fG-PO-mG- | |
| | PO-mA-PO-fU-PO-mU-PO-fA- | | PO-fA-PO-mU-PO-fU-PO- | |
| | PO-mA-PO-fA-PO-mU-PO-fC- | | mU-PO-fA-PO-mA-PO-fU- | |
| | PO-mC-PO-fU-PO-mU-PO-fA- | | PO-mA-PO-fC-PO-mC-PO- | |
| | PO-mA-PO-fG-PO-invdT-Hy | | fA-PO-mG-PO-dT-PO-dT-Hy | |
| 050 | Hy-mC-PO-mC-PO-mA-PO-fU- | 478 | Hy-fU-PO-fC-PO-mU-PO- | 692 |
| | PO-mG-PO-fG-PO-mU-PO-fA- | | fU-PO-mA-PO-fA-PO-mG- | |
| | PO-mU-PO-fU-PO-mA-PO-fA- | | PO-fG-PO-mA-PO-fU-PO- | |
| | PO-mA-PO-fU-PO-mC-PO-fC- | | mU-PO-fU-PO-mA-PO-fA- | |
| | PO-mU-PO-fU-PO-mA-PO-fA- | | PO-mU-PO-fA-PO-mC-PO- | |
| | PO-mG-PO-fA-PO-invdT-Hy | | fC-PO-mA-PO-dT-PO-dT-Hy | |
| 051 | Hy-mC-PO-mC-PO-mA-PO-fG- | 479 | Hy-fU-PO-fC-PO-mU-PO- | 693 |
| | PO-mU-PO-fA-PO-mU-PO-fU- | | fC-PO-mU-PO-fU-PO-mA- | |
| | PO-mA-PO-fA-PO-mA-PO-fU- | | PO-fA-PO-mG-PO-fG-PO- | |
| | PO-mC-PO-fC-PO-mU-PO-fU- | | mA-PO-fU-PO-mU-PO-fU- | |
| | PO-mA-PO-fA-PO-mG-PO-fA- | | PO-mA-PO-fA-PO-mU-PO- | |
| | PO-mG-PO-fA-PO-invdT-Hy | | fA-PO-mC-PO-dT-PO-dT-Hy | |
| 052 | Hy-mC-PO-mC-PO-mA-PO-fA- | 480 | Hy-fU-PO-fG-PO-mU-PO- | 694 |
| | PO-mU-PO-fU-PO-mU-PO-fA- | | fA-PO-mU-PO-fG-PO-mU- | |
| | PO-mA-PO-fG-PO-mA-PO-fU- | | PO-fU-PO-mU-PO-fA-PO- | |
| | PO-mU-PO-fA-PO-mA-PO-fA- | | mA-PO-fU-PO-mC-PO-fU- | |
| | PO-mC-PO-fA-PO-mU-PO-fA- | | PO-mU-PO-fA-PO-mA-PO- | |
| | PO-mC-PO-fA-PO-invdT-Hy | | fA-PO-mU-PO-dT-PO-dT-Hy | |
| 053 | Hy-mC-PO-mC-PO-mA-PO-fA- | 481 | Hy-fU-PO-fG-PO-mA-PO- | 695 |
| | PO-mA-PO-fG-PO-mA-PO-fU- | | fU-PO-mU-PO-fG-PO-mU- | |
| | PO-mU-PO-fA-PO-mA-PO-fA- | | PO-fA-PO-mU-PO-fG-PO- | |
| | PO-mC-PO-fA-PO-mU-PO-fA- | | mU-PO-fU-PO-mU-PO-fA- | |
| | PO-mC-PO-fA-PO-mA-PO-fU- | | PO-mA-PO-fU-PO-mC-PO- | |
| | PO-mC-PO-fA-PO-invdT-Hy | | fU-PO-mU-PO-dT-PO-dT-Hy | |
| 054 | Hy-mC-PO-mC-PO-mA-PO-fA- | 482 | Hy-fG-PO-fU-PO-mG-PO- | 696 |
| | PO-mG-PO-fA-PO-mU-PO-fU- | | fA-PO-mU-PO-fU-PO-mG- | |
| | PO-mA-PO-fA-PO-mA-PO-fC- | | PO-fU-PO-mA-PO-fU-PO- | |
| | PO-mA-PO-fU-PO-mA-PO-fC- | | mG-PO-fU-PO-mU-PO-fU- | |
| | PO-mA-PO-fA-PO-mU-PO-fC- | | PO-mA-PO-fA-PO-mU-PO- | |
| | PO-mA-PO-fC-PO-invdT-Hy | | fC-PO-mU-PO-dT-PO-dT-Hy | |
| 055 | Hy-mC-PO-mC-PO-mA-PO-fG- | 483 | Hy-fU-PO-fG-PO-mU-PO- | 697 |
| | PO-mA-PO-fU-PO-mU-PO-fA- | | fG-PO-mA-PO-fU-PO-mU- | |
| | PO-mA-PO-fA-PO-mC-PO-fA- | | PO-fG-PO-mU-PO-fA-PO- | |
| | PO-mU-PO-fA-PO-mC-PO-fA- | | mU-PO-fG-PO-mU-PO-fU- | |
| | PO-mA-PO-fU-PO-mC-PO-fA- | | PO-mU-PO-fA-PO-mA-PO- | |
| | PO-mC-PO-fA-PO-invdT-Hy | | fU-PO-mC-PO-dT-PO-dT-Hy | |
| 056 | Hy-mC-PO-mC-PO-mA-PO-fA- | 484 | Hy-fG-PO-fU-PO-mU-PO- | 698 |
| | PO-mA-PO-fA-PO-mC-PO-fA- | | fA-PO-mU-PO-fG-PO-mU- | |
| | PO-mU-PO-fA-PO-mC-PO-fA- | | PO-fG-PO-mA-PO-fU-PO- | |
| | PO-mA-PO-fU-PO-mC-PO-fA- | | mU-PO-fG-PO-mU-PO-fA- | |
| | PO-mC-PO-fA-PO-mU-PO-fA- | | PO-mU-PO-fG-PO-mU-PO- | |
| | PO-mA-PO-fC-PO-invdT-Hy | | fU-PO-mU-PO-dT-PO-dT-Hy | |
| 057 | Hy-mC-PO-mC-PO-mA-PO-fA- | 485 | Hy-fG-PO-fG-PO-mU-PO- | 699 |
| | PO-mA-PO-fC-PO-mA-PO-fU- | | fU-PO-mA-PO-fU-PO-mG- | |
| | PO-mA-PO-fC-PO-mA-PO-fA- | | PO-fU-PO-mG-PO-fA-PO- | |
| | PO-mU-PO-fC-PO-mA-PO-fC- | | mU-PO-fU-PO-mG-PO-fU- | |
| | PO-mA-PO-fU-PO-mA-PO-fA- | | PO-mA-PO-fU-PO-mG-PO- | |
| | PO-mC-PO-fC-PO-invdT-Hy | | fU-PO-mU-PO-dT-PO-dT-Hy | |
| 058 | Hy-mC-PO-mC-PO-mA-PO-fA- | 486 | Hy-fA-PO-fG-PO-mG-PO- | 700 |
| | PO-mC-PO-fA-PO-mU-PO-fA- | | fU-PO-mU-PO-fA-PO-mU- | |
| | PO-mC-PO-fA-PO-mA-PO-fU- | | PO-fG-PO-mU-PO-fG-PO- | |
| | PO-mC-PO-fA-PO-mC-PO-fA- | | mA-PO-fU-PO-mU-PO-fG- | |
| | PO-mU-PO-fA-PO-mA-PO-fC- | | PO-mU-PO-fA-PO-mU-PO- | |
| | PO-mC-PO-fU-PO-invdT-Hy | | fG-PO-mU-PO-dT-PO-dT-Hy | |
| 059 | Hy-mC-PO-mC-PO-mA-PO-fA- | 487 | Hy-fU-PO-fA-PO-mA-PO- | 70 |
| | PO-mU-PO-fA-PO-mC-PO-fA- | | fG-PO-mG-PO-fU-PO-mU- | |
| | PO-mA-PO-fU-PO-mC-PO-fA- | | PO-fA-PO-mU-PO-fG-PO- | |
| | PO-mC-PO-fA-PO-mU-PO-fA- | | mU-PO-fG-PO-mA-PO-fU- | |
| | PO-mA-PO-fC-PO-mC-PO-fU- | | PO-mU-PO-fG-PO-mU-PO- | |
| | PO-mU-PO-fA-PO-invdT-Hy | | fA-PO-mU-PO-dT-PO-dT-Hy | |
| 060 | Hy-mC-PO-mC-PO-mA-PO-fA- | 488 | Hy-fU-PO-fU-PO-mU-PO- | 702 |
| | PO-mC-PO-fA-PO-mA-PO-fU- | | fA-PO-mA-PO-fG-PO-mG- | |
| | PO-mC-PO-fA-PO-mC-PO-fA- | | PO-fU-PO-mU-PO-fA-PO- | |
| | PO-mU-PO-fA-PO-mA-PO-fC- | | mU-PO-fG-PO-mU-PO-fG- | |
| | PO-mC-PO-fU-PO-mU-PO-fA- | | PO-mA-PO-fU-PO-mU-PO- | |
| | PO-mA-PO-fA-PO-invdT-Hy | | fG-PO-mU-PO-dT-PO-dT-Hy | |
| 061 | Hy-mC-PO-mC-PO-mA-PO-fC- | 489 | Hy-fC-PO-fU-PO-mU-PO- | 703 |
| | PO-mA-PO-fA-PO-mU-PO-fC- | | fU-PO-mA-PO-fA-PO-mG- | |
| | PO-mA-PO-fC-PO-mA-PO-fU- | | PO-fG-PO-mU-PO-fU-PO- | |
| | PO-mA-PO-fA-PO-mC-PO-fC- | | mA-PO-fU-PO-mG-PO-fU- | |
| | PO-mU-PO-fU-PO-mA-PO-fA- | | PO-mG-PO-fA-PO-mU-PO- | |
| | PO-mA-PO-fG-PO-invdT-Hy | | fU-PO-mG-PO-dT-PO-dT-Hy | |
| 062 | Hy-mC-PO-mC-PO-mA-PO-fA- | 490 | Hy-fU-PO-fC-PO-mU-PO- | 704 |
| | PO-mA-PO-fU-PO-mC-PO-fA- | | fU-PO-mU-PO-fA-PO-mA- | |
| | PO-mC-PO-fA-PO-mU-PO-fA- | | PO-fG-PO-mG-PO-fU-PO- | |
| | PO-mA-PO-fC-PO-mC-PO-fU- | | mU-PO-fA-PO-mU-PO-fG- | |
| | PO-mU-PO-fA-PO-mA-PO-fA- | | PO-mU-PO-fG-PO-mA-PO- | |
| | PO-mG-PO-fA-PO-invdT-Hy | | fU-PO-mU-PO-dT-PO-dT-Hy | |
| 063 | Hy-mC-PO-mC-PO-mA-PO-fA- | 491 | Hy-fU-PO-fU-PO-mC-PO- | 705 |
| | PO-mU-PO-fC-PO-mA-PO-fC- | | fU-PO-mU-PO-fU-PO-mA- | |
| | PO-mA-PO-fU-PO-mA-PO-fA- | | PO-fA-PO-mG-PO-fG-PO- | |
| | PO-mC-PO-fC-PO-mU-PO-fU- | | mU-PO-fU-PO-mA-PO-fU- | |
| | PO-mA-PO-fA-PO-mA-PO-fG- | | PO-mG-PO-fU-PO-mG-PO- | |
| | PO-mA-PO-fA-PO-invdT-Hy | | fA-PO-mU-PO-dT-PO-dT-Hy | |
| 064 | Hy-mC-PO-mC-PO-mA-PO-fU- | 492 | Hy-fA-PO-fU-PO-mU-PO- | 706 |
| | PO-mC-PO-fA-PO-mC-PO-fA- | | fC-PO-mU-PO-fU-PO-mU- | |
| | PO-mU-PO-fA-PO-mA-PO-fC- | | PO-fA-PO-mA-PO-fG-PO- | |
| | PO-mC-PO-fU-PO-mU-PO-fA- | | mG-PO-fU-PO-mU-PO-fA- | |
| | PO-mA-PO-fA-PO-mG-PO-fA- | | PO-mU-PO-fG-PO-mU-PO- | |
| | PO-mA-PO-fU-PO-invdT-Hy | | fG-PO-mA-PO-dT-PO-dT-Hy | |
| 065 | Hy-mC-PO-mC-PO-mA-PO-fC- | 493 | Hy-fU-PO-fA-PO-mU-PO- | 707 |
| | PO-mA-PO-fC-PO-mA-PO-fU- | | fU-PO-mC-PO-fU-PO-mU- | |
| | PO-mA-PO-fA-PO-mC-PO-fC- | | PO-fU-PO-mA-PO-fA-PO- | |
| | PO-mU-PO-fU-PO-mA-PO-fA- | | mG-PO-fG-PO-mU-PO-fU- | |
| | PO-mA-PO-fG-PO-mA-PO-fA- | | PO-mA-PO-fU-PO-mG-PO- | |
| | PO-mU-PO-fA-PO-invdT-Hy | | fU-PO-mG-PO-dT-PO-dT-Hy | |
| 066 | Hy-mC-PO-mC-PO-mA-PO-fA- | 494 | Hy-fG-PO-fU-PO-mA-PO- | 708 |
| | PO-mC-PO-fA-PO-mU-PO-fA- | | fU-PO-mU-PO-fC-PO-mU- | |
| | PO-mA-PO-fC-PO-mC-PO-fU- | | PO-fU-PO-mU-PO-fA-PO- | |
| | PO-mU-PO-fA-PO-mA-PO-fA- | | mA-PO-fG-PO-mG-PO-fU- | |
| | PO-mG-PO-fA-PO-mA-PO-fU- | | PO-mU-PO-fA-PO-mU-PO- | |
| | PO-mA-PO-fC-PO-invdT-Hy | | fG-PO-mU-PO-dT-PO-dT-Hy | |
| 067 | Hy-mC-PO-mC-PO-mA-PO-fC- | 495 | Hy-fG-PO-fG-PO-mU-PO- | 709 |
| | PO-mA-PO-fU-PO-mA-PO-fA- | | fA-PO-mU-PO-fU-PO-mC- | |
| | PO-mC-PO-fC-PO-mU-PO-fU- | | PO-fU-PO-mU-PO-fU-PO- | |
| | PO-mA-PO-fA-PO-mA-PO-fG- | | mA-PO-fA-PO-mG-PO-fG- | |
| | PO-mA-PO-fA-PO-mU-PO-fA- | | PO-mU-PO-fU-PO-mA-PO- | |
| | PO-mC-PO-fC-PO-invdT-Hy | | fU-PO-mG-PO-dT-PO-dT-Hy | |
| 068 | Hy-mC-PO-mC-PO-mA-PO-fC- | 496 | Hy-fG-PO-fA-PO-mA-PO- | 710 |
| | PO-mA-PO-fU-PO-mU-PO-fU- | | fU-PO-mU-PO-fU-PO-mU- | |
| | PO-mC-PO-fU-PO-mC-PO-fA- | | PO-fG-PO-mA-PO-fU-PO- | |
| | PO-mA-PO-fU-PO-mC-PO-fA- | | mU-PO-fG-PO-mA-PO-fG- | |
| | PO-mA-PO-fA-PO-mA-PO-fU- | | PO-mA-PO-fA-PO-mA-PO- | |
| | PO-mU-PO-fC-PO-invdT-Hy | | fU-PO-mG-PO-dT-PO-dT-Hy | |
| 069 | Hy-mC-PO-mC-PO-mA-PO-fU- | 497 | Hy-fU-PO-fA-PO-mA-PO- | 711 |
| | PO-mU-PO-fC-PO-mU-PO-fC- | | fG-PO-mA-PO-fA-PO-mU- | |
| | PO-mA-PO-fA-PO-mU-PO-fC- | | PO-fU-PO-mU-PO-fU-PO- | |
| | PO-mA-PO-fA-PO-mA-PO-fA- | | mG-PO-fA-PO-mU-PO-fU- | |
| | PO-mU-PO-fU-PO-mC-PO-fU- | | PO-mG-PO-fA-PO-mG-PO- | |
| | PO-mU-PO-fA-PO-invdT-Hy | | fA-PO-mA-PO-dT-PO-dT-Hy | |
| 070 | Hy-mC-PO-mC-PO-mA-PO-fA- | 498 | Hy-fG-PO-fA-PO-mU-PO- | 712 |
| | PO-mU-PO-fU-PO-mU-PO-fU- | | fU-PO-mC-PO-fC-PO-mC- | |
| | PO-mG-PO-fU-PO-mG-PO-fA- | | PO-fA-PO-mC-PO-fA-PO- | |
| | PO-mU-PO-fG-PO-mU-PO-fG- | | mU-PO-fC-PO-mA-PO-fC- | |
| | PO-mG-PO-fG-PO-mA-PO-fA- | | PO-mA-PO-fA-PO-mA-PO- | |
| | PO-mU-PO-fC-PO-invdT-Hy | | fA-PO-mU-PO-dT-PO-dT-Hy | |
| 071 | Hy-mC-PO-mC-PO-mA-PO-fU- | 499 | Hy-fU-PO-fG-PO-mA-PO- | 713 |
| | PO-mU-PO-fU-PO-mU-PO-fG- | | fU-PO-mU-PO-fC-PO-mC- | |
| | PO-mU-PO-fG-PO-mA-PO-fU- | | PO-fC-PO-mA-PO-fC-PO- | |
| | PO-mG-PO-fU-PO-mG-PO-fG- | | mA-PO-fU-PO-mC-PO-fA- | |
| | PO-mG-PO-fA-PO-mA-PO-fU- | | PO-mC-PO-fA-PO-mA-PO- | |
| | PO-mC-PO-fA-PO-invdT-Hy | | fA-PO-mA-PO-dT-PO-dT-Hy | |
| 072 | Hy-mC-PO-mC-PO-mA-PO-fU- | 500 | Hy-fU-PO-fU-PO-mG-PO- | 714 |
| | PO-mU-PO-fU-PO-mG-PO-fU- | | fA-PO-mU-PO-fU-PO-mC- | |
| | PO-mG-PO-fA-PO-mU-PO-fG- | | PO-fC-PO-mC-PO-fA-PO- | |
| | PO-mU-PO-fG-PO-mG-PO-fG- | | mC-PO-fA-PO-mU-PO-fC- | |
| | PO-mA-PO-fA-PO-mU-PO-fC- | | PO-mA-PO-fC-PO-mA-PO- | |
| | PO-mA-PO-fA-PO-invdT-Hy | | fA-PO-mA-PO-dT-PO-dT-Hy | |
| 073 | Hy-mC-PO-mC-PO-mA-PO-fU- | 501 | Hy-fA-PO-fU-PO-mU-PO- | 715 |
| | PO-mU-PO-fG-PO-mU-PO-fG- | | fG-PO-mA-PO-fU-PO-mU- | |
| | PO-mA-PO-fU-PO-mG-PO-fU- | | PO-fC-PO-mC-PO-fC-PO- | |
| | PO-mG-PO-fG-PO-mG-PO-fA- | | mA-PO-fC-PO-mA-PO-fU- | |
| | PO-mA-PO-fU-PO-mC-PO-fA- | | PO-mC-PO-fA-PO-mC-PO- | |
| | PO-mA-PO-fU-PO-invdT-Hy | | fA-PO-mA-PO-dT-PO-dT-Hy | |
| 074 | Hy-mC-PO-mC-PO-mA-PO-fU- | 502 | Hy-fA-PO-fA-PO-mU-PO- | 716 |
| | PO-mG-PO-fU-PO-mG-PO-fA- | | fU-PO-mG-PO-fA-PO-mU- | |
| | PO-mU-PO-fG-PO-mU-PO-fG- | | PO-fU-PO-mC-PO-fC-PO- | |
| | PO-mG-PO-fG-PO-mA-PO-fA- | | mC-PO-fA-PO-mC-PO-fA- | |
| | PO-mU-PO-fC-PO-mA-PO-fA- | | PO-mU-PO-fC-PO-mA-PO- | |
| | PO-mU-PO-fU-PO-invdT-Hy | | fC-PO-mA-PO-dT-PO-dT-Hy | |
| 075 | Hy-mC-PO-mC-PO-mA-PO-fG- | 503 | Hy-fA-PO-fA-PO-mA-PO- | 717 |
| | PO-mU-PO-fG-PO-mA-PO-fU- | | fU-PO-mU-PO-fG-PO-mA- | |
| | PO-mG-PO-fU-PO-mG-PO-fG- | | PO-fU-PO-mU-PO-fC-PO- | |
| | PO-mG-PO-fA-PO-mA-PO-fU- | | mC-PO-fC-PO-mA-PO-fC- | |
| | PO-mC-PO-fA-PO-mA-PO-fU- | | PO-mA-PO-fU-PO-mC-PO- | |
| | PO-mU-PO-fU-PO-invdT-Hy | | fA-PO-mC-PO-dT-PO-dT-Hy | |
| 076 | Hy-mC-PO-mC-PO-mA-PO-fU- | 504 | Hy-fA-PO-fA-PO-mA-PO- | 718 |
| | PO-mG-PO-fA-PO-mU-PO-fG- | | fA-PO-mU-PO-fU-PO-mG- | |
| | PO-mU-PO-fG-PO-mG-PO-fG- | | PO-fA-PO-mU-PO-fU-PO- | |
| | PO-mA-PO-fA-PO-mU-PO-fC- | | mC-PO-fC-PO-mC-PO-fA- | |
| | PO-mA-PO-fA-PO-mU-PO-fU- | | PO-mC-PO-fA-PO-mU-PO- | |
| | PO-mU-PO-fU-PO-invdT-Hy | | fC-PO-mA-PO-dT-PO-dT-Hy | |
| 077 | Hy-mC-PO-mC-PO-mA-PO-fG- | 505 | Hy-fU-PO-fA-PO-mA-PO- | 719 |
| | PO-mA-PO-fU-PO-mG-PO-fU- | | fA-PO-mA-PO-fU-PO-mU- | |
| | PO-mG-PO-fG-PO-mG-PO-fA- | | PO-fG-PO-mA-PO-fU-PO- | |
| | PO-mA-PO-fU-PO-mC-PO-fA- | | mU-PO-fC-PO-mC-PO-fC- | |
| | PO-mA-PO-fU-PO-mU-PO-fU- | | PO-mA-PO-fC-PO-mA-PO- | |
| | PO-mU-PO-fA-PO-invdT-Hy | | fU-PO-mC-PO-dT-PO-dT-Hy | |
| 078 | Hy-mC-PO-mC-PO-mA-PO-fA- | 506 | Hy-fC-PO-fU-PO-mA-PO- | 720 |
| | PO-mU-PO-fG-PO-mU-PO-fG- | | fA-PO-mA-PO-fA-PO-mU- | |
| | PO-mG-PO-fG-PO-mA-PO-fA- | | PO-fU-PO-mG-PO-fA-PO- | |
| | PO-mU-PO-fC-PO-mA-PO-fA- | | mU-PO-fU-PO-mC-PO-fC- | |
| | PO-mU-PO-fU-PO-mU-PO-fU- | | PO-mC-PO-fA-PO-mC-PO- | |
| | PO-mA-PO-fG-PO-invdT-Hy | | fA-PO-mU-PO-dT-PO-dT-Hy | |
| 079 | Hy-mC-PO-mC-PO-mA-PO-fU- | 507 | Hy-fU-PO-fC-PO-mU-PO- | 721 |
| | PO-mG-PO-fU-PO-mG-PO-fG- | | fA-PO-mA-PO-fA-PO-mA- | |
| | PO-mG-PO-fA-PO-mA-PO-fU- | | PO-fU-PO-mU-PO-fG-PO- | |
| | PO-mC-PO-fA-PO-mA-PO-fU- | | mA-PO-fU-PO-mU-PO-fC- | |
| | PO-mU-PO-fU-PO-mU-PO-fA- | | PO-mC-PO-fC-PO-mA-PO- | |
| | PO-mG-PO-fA-PO-invdT-Hy | | fC-PO-mA-PO-dT-PO-dT-Hy | |
| 080 | Hy-mC-PO-mC-PO-mA-PO-fG- | 508 | Hy-fA-PO-fU-PO-mC-PO- | 722 |
| | PO-mU-PO-fG-PO-mG-PO-fG- | | fU-PO-mA-PO-fA-PO-mA- | |
| | PO-mA-PO-fA-PO-mU-PO-fC- | | PO-fA-PO-mU-PO-fU-PO- | |
| | PO-mA-PO-fA-PO-mU-PO-fU- | | mG-PO-fA-PO-mU-PO-fU- | |
| | PO-mU-PO-fU-PO-mA-PO-fG- | | PO-mC-PO-fC-PO-mC-PO- | |
| | PO-mA-PO-fU-PO-invdT-Hy | | fA-PO-mC-PO-dT-PO-dT-Hy | |
| 081 | Hy-mC-PO-mC-PO-mA-PO-fU- | 509 | Hy-fC-PO-fA-PO-mU-PO- | 723 |
| | PO-mG-PO-fG-PO-mG-PO-fA- | | fC-PO-mU-PO-fA-PO-mA- | |
| | PO-mA-PO-fU-PO-mC-PO-fA- | | PO-fA-PO-mA-PO-fU-PO- | |
| | PO-mA-PO-fU-PO-mU-PO-fU- | | mU-PO-fG-PO-mA-PO-fU- | |
| | PO-mU-PO-fA-PO-mG-PO-fA- | | PO-mU-PO-fC-PO-mC-PO- | |
| | PO-mU-PO-fG-PO-invdT-Hy | | fC-PO-mA-PO-dT-PO-dT-Hy | |
| 082 | Hy-mC-PO-mC-PO-mA-PO-fG- | 510 | Hy-fC-PO-fC-PO-mA-PO- | 724 |
| | PO-mG-PO-fG-PO-mA-PO-fA- | | fU-PO-mC-PO-fU-PO-mA- | |
| | PO-mU-PO-fC-PO-mA-PO-fA- | | PO-fA-PO-mA-PO-fA-PO- | |
| | PO-mU-PO-fU-PO-mU-PO-fU- | | mU-PO-fU-PO-mG-PO-fA- | |
| | PO-mA-PO-fG-PO-mA-PO-fU- | | PO-mU-PO-fU-PO-mC-PO- | |
| | PO-mG-PO-fG-PO-invdT-Hy | | fC-PO-mC-PO-dT-PO-dT-Hy | |
| 083 | Hy-mC-PO-mC-PO-mA-PO-fG- | 511 | Hy-fA-PO-fC-PO-mC-PO- | 725 |
| | PO-mG-PO-fA-PO-mA-PO-fU- | | fA-PO-mU-PO-fC-PO-mU- | |
| | PO-mC-PO-fA-PO-mA-PO-fU- | | PO-fA-PO-mA-PO-fA-PO- | |
| | PO-mU-PO-fU-PO-mU-PO-fA- | | mA-PO-fU-PO-mU-PO-fG- | |
| | PO-mG-PO-fA-PO-mU-PO-fG- | | PO-mA-PO-fU-PO-mU-PO- | |
| | PO-mG-PO-fU-PO-invdT-Hy | | fC-PO-mC-PO-dT-PO-dT-Hy | |
| 084 | Hy-mC-PO-mC-PO-mA-PO-fG- | 512 | Hy-fG-PO-fA-PO-mC-PO- | 726 |
| | PO-mA-PO-fA-PO-mU-PO-fC- | | fC-PO-mA-PO-fU-PO-mC- | |
| | PO-mA-PO-fA-PO-mU-PO-fU- | | PO-fU-PO-mA-PO-fA-PO- | |
| | PO-mU-PO-fU-PO-mA-PO-fG- | | mA-PO-fA-PO-mU-PO-fU- | |
| | PO-mA-PO-fU-PO-mG-PO-fG- | | PO-mG-PO-fA-PO-mU-PO- | |
| | PO-mU-PO-fC-PO-invdT-Hy | | fU-PO-mC-PO-dT-PO-dT-Hy | |
| 085 | Hy-mC-PO-mC-PO-mA-PO-fC- | 513 | Hy-fG-PO-fA-PO-mU-PO- | 727 |
| | PO-mA-PO-fU-PO-mC-PO-fA- | | fA-PO-mU-PO-fU-PO-mA- | |
| | PO-mU-PO-fA-PO-mU-PO-fG- | | PO-fG-PO-mC-PO-fU-PO- | |
| | PO-mA-PO-fG-PO-mC-PO-fU- | | mC-PO-fA-PO-mU-PO-fA- | |
| | PO-mA-PO-fA-PO-mU-PO-fA- | | PO-mU-PO-fG-PO-mA-PO- | |
| | PO-mU-PO-fC-PO-invdT-Hy | | fU-PO-mG-PO-dT-PO-dT-Hy | |
| 086 | Hy-mC-PO-mC-PO-mA-PO-fA- | 514 | Hy-fU-PO-fG-PO-mA-PO- | 728 |
| | PO-mU-PO-fC-PO-mA-PO-fU- | | fU-PO-mA-PO-fU-PO-mU- | |
| | PO-mA-PO-fU-PO-mG-PO-fA- | | PO-fA-PO-mG-PO-fC-PO- | |
| | PO-mG-PO-fC-PO-mU-PO-fA- | | mU-PO-fC-PO-mA-PO-fU- | |
| | PO-mA-PO-fU-PO-mA-PO-fU- | | PO-mA-PO-fU-PO-mG-PO- | |
| | PO-mC-PO-fA-PO-invdT-Hy | | fA-PO-mU-PO-dT-PO-dT-Hy | |
| 087 | Hy-mC-PO-mC-PO-mA-PO-fU- | 515 | Hy-fG-PO-fU-PO-mG-PO- | 729 |
| | PO-mC-PO-fA-PO-mU-PO-fA- | | fA-PO-mU-PO-fA-PO-mU- | |
| | PO-mU-PO-fG-PO-mA-PO-fG- | | PO-fU-PO-mA-PO-fG-PO- | |
| | PO-mC-PO-fU-PO-mA-PO-fA- | | mC-PO-fU-PO-mC-PO-fA- | |
| | PO-mU-PO-fA-PO-mU-PO-fC- | | PO-mU-PO-fA-PO-mU-PO- | |
| | PO-mA-PO-fC-PO-invdT-Hy | | fG-PO-mA-PO-dT-PO-dT-Hy | |
| 088 | Hy-mC-PO-mC-PO-mA-PO-fC- | 516 | Hy-fU-PO-fG-PO-mU-PO- | 730 |
| | PO-mA-PO-fU-PO-mA-PO-fU- | | fG-PO-mA-PO-fU-PO-mA- | |
| | PO-mG-PO-fA-PO-mG-PO-fC- | | PO-fU-PO-mU-PO-fA-PO- | |
| | PO-mU-PO-fA-PO-mA-PO-fU- | | mG-PO-fC-PO-mU-PO-fC- | |
| | PO-mA-PO-fU-PO-mC-PO-fA- | | PO-mA-PO-fU-PO-mA-PO- | |
| | PO-mC-PO-fA-PO-invdT-Hy | | fU-PO-mG-PO-dT-PO-dT-Hy | |
| 089 | Hy-mC-PO-mC-PO-mA-PO-fA- | 517 | Hy-fU-PO-fU-PO-mG-PO- | 731 |
| | PO-mU-PO-fA-PO-mU-PO-fG- | | fU-PO-mG-PO-fA-PO-mU- | |
| | PO-mA-PO-fG-PO-mC-PO-fU- | | PO-fA-PO-mU-PO-fU-PO- | |
| | PO-mA-PO-fA-PO-mU-PO-fA- | | mA-PO-fG-PO-mC-PO-fU- | |
| | PO-mU-PO-fC-PO-mA-PO-fC- | | PO-mC-PO-fA-PO-mU-PO- | |
| | PO-mA-PO-fA-PO-invdT-Hy | | fA-PO-mU-PO-dT-PO-dT-Hy | |
| 090 | Hy-mC-PO-mC-PO-mA-PO-fC- | 518 | Hy-fA-PO-fC-PO-mU-PO- | 732 |
| | PO-mC-PO-fC-PO-mA-PO-fG- | | fA-PO-mG-PO-fU-PO-mU- | |
| | PO-mU-PO-fU-PO-mU-PO-fA- | | PO-fU-PO-mU-PO-fU-PO- | |
| | PO-mA-PO-fA-PO-mA-PO-fA- | | mU-PO-fA-PO-mA-PO-fA- | |
| | PO-mA-PO-fC-PO-mU-PO-fA- | | PO-mC-PO-fU-PO-mG-PO- | |
| | PO-mG-PO-fU-PO-invdT-Hy | | fG-PO-mG-PO-dT-PO-dT-Hy | |
| 091 | Hy-mC-PO-mC-PO-mA-PO-fU- | 519 | Hy-fA-PO-fG-PO-mU-PO- | 733 |
| | PO-mA-PO-fA-PO-mA-PO-fA- | | fC-PO-mA-PO-fA-PO-mG- | |
| | PO-mC-PO-fU-PO-mC-PO-fU- | | PO-fU-PO-mU-PO-fU-PO- | |
| | PO-mA-PO-fA-PO-mA-PO-fC- | | mA-PO-fG-PO-mA-PO-fG- | |
| | PO-mU-PO-fU-PO-mG-PO-fA- | | PO-mU-PO-fU-PO-mU-PO- | |
| | PO-mC-PO-fU-PO-invdT-Hy | | fU-PO-mA-PO-dT-PO-dT-Hy | |
| 092 | Hy-mC-PO-mC-PO-mA-PO-fA- | 520 | Hy-fU-PO-fA-PO-mG-PO- | 734 |
| | PO-mA-PO-fA-PO-mA-PO-fC- | | fU-PO-mC-PO-fA-PO-mA- | |
| | PO-mU-PO-fC-PO-mU-PO-fA- | | PO-fG-PO-mU-PO-fU-PO- | |
| | PO-mA-PO-fA-PO-mC-PO-fU- | | mU-PO-fA-PO-mG-PO-fA- | |
| | PO-mU-PO-fG-PO-mA-PO-fC- | | PO-mG-PO-fU-PO-mU-PO- | |
| | PO-mU-PO-fA-PO-invdT-Hy | | fU-PO-mU-PO-dT-PO-dT-Hy | |
| 093 | Hy-mC-PO-mC-PO-mA-PO-fA- | 521 | Hy-fU-PO-fU-PO-mA-PO- | 735 |
| | PO-mA-PO-fA-PO-mC-PO-fU- | | fG-PO-mU-PO-fC-PO-mA- | |
| | PO-mC-PO-fU-PO-mA-PO-fA- | | PO-fA-PO-mG-PO-fU-PO- | |
| | PO-mA-PO-fC-PO-mU-PO-fU- | | mU-PO-fU-PO-mA-PO-fG- | |
| | PO-mG-PO-fA-PO-mC-PO-fU- | | PO-mA-PO-fG-PO-mU-PO- | |
| | PO-mA-PO-fA-PO-invdT-Hy | | fU-PO-mU-PO-dT-PO-dT-Hy | |
| 094 | Hy-mC-PO-mC-PO-mA-PO-fA- | 522 | Hy-fA-PO-fU-PO-mU-PO- | 736 |
| | PO-mC-PO-fU-PO-mC-PO-fU- | | fU-PO-mA-PO-fG-PO-mU- | |
| | PO-mA-PO-fA-PO-mA-PO-fC- | | PO-fC-PO-mA-PO-fA-PO- | |
| | PO-mU-PO-fU-PO-mG-PO-fA- | | mG-PO-fU-PO-mU-PO-fU- | |
| | PO-mC-PO-fU-PO-mA-PO-fA- | | PO-mA-PO-fG-PO-mA-PO- | |
| | PO-mA-PO-fU-PO-invdT-Hy | | fG-PO-mU-PO-dT-PO-dT-Hy | |
| 095 | Hy-mC-PO-mC-PO-mA-PO-fC- | 523 | Hy-fU-PO-fA-PO-mU-PO- | 737 |
| | PO-mU-PO-fC-PO-mU-PO-fA- | | fU-PO-mU-PO-fA-PO-mG- | |
| | PO-mA-PO-fA-PO-mC-PO-fU- | | PO-fU-PO-mC-PO-fA-PO- | |
| | PO-mU-PO-fG-PO-mA-PO-fC- | | mA-PO-fG-PO-mU-PO-fU- | |
| | PO-mU-PO-fA-PO-mA-PO-fA- | | PO-mU-PO-fA-PO-mG-PO- | |
| | PO-mU-PO-fA-PO-invdT-Hy | | fA-PO-mG-PO-dT-PO-dT-Hy | |
| 096 | Hy-mC-PO-mC-PO-mA-PO-fG- | 524 | Hy-fA-PO-fC-PO-mA-PO- | 738 |
| | PO-mU-PO-fC-PO-mA-PO-fG- | | fC-PO-mA-PO-fU-PO-mA- | |
| | PO-mC-PO-fA-PO-mC-PO-fA- | | PO-fC-PO-mU-PO-fC-PO- | |
| | PO-mG-PO-fA-PO-mG-PO-fU- | | mU-PO-fG-PO-mU-PO-fG- | |
| | PO-mA-PO-fU-PO-mG-PO-fU- | | PO-mC-PO-fU-PO-mG-PO- | |
| | PO-mG-PO-fU-PO-invdT-Hy | | fA-PO-mC-PO-dT-PO-dT-Hy | |
| 097 | Hy-mC-PO-mC-PO-mA-PO-fG- | 525 | Hy-fU-PO-fA-PO-mG-PO- | 739 |
| | PO-mA-PO-fU-PO-mU-PO-fU- | | fG-PO-mU-PO-fU-PO-mU- | |
| | PO-mA-PO-fU-PO-mU-PO-fU- | | PO-fC-PO-mA-PO-fU-PO- | |
| | PO-mA-PO-fU-PO-mG-PO-fA- | | mA-PO-fA-PO-mA-PO-fU- | |
| | PO-mA-PO-fA-PO-mC-PO-fC- | | PO-mA-PO-fA-PO-mA-PO- | |
| | PO-mU-PO-fA-PO-invdT-Hy | | fU-PO-mC-PO-dT-PO-dT-Hy | |
| 098 | Hy-mC-PO-mC-PO-mA-PO-fA- | 526 | Hy-fU-PO-fU-PO-mC-PO- | 740 |
| | PO-mU-PO-fU-PO-mU-PO-fA- | | fA-PO-mU-PO-fU-PO-mA- | |
| | PO-mU-PO-fG-PO-mA-PO-fA- | | PO-fG-PO-mG-PO-fU-PO- | |
| | PO-mA-PO-fC-PO-mC-PO-fU- | | mU-PO-fU-PO-mC-PO-fA- | |
| | PO-mA-PO-fA-PO-mU-PO-fG- | | PO-mU-PO-fA-PO-mA-PO- | |
| | PO-mA-PO-fA-PO-invdT-Hy | | fA-PO-mU-PO-dT-PO-dT-Hy | |
| 099 | Hy-mC-PO-mC-PO-mA-PO-fU- | 527 | Hy-fC-PO-fU-PO-mU-PO- | 741 |
| | PO-mU-PO-fU-PO-mA-PO-fU- | | fC-PO-mA-PO-fU-PO-mU- | |
| | PO-mG-PO-fA-PO-mA-PO-fA- | | PO-fA-PO-mG-PO-fG-PO- | |
| | PO-mC-PO-fC-PO-mU-PO-fA- | | mU-PO-fU-PO-mU-PO-fC- | |
| | PO-mA-PO-fU-PO-mG-PO-fA- | | PO-mA-PO-fU-PO-mA-PO- | |
| | PO-mA-PO-fG-PO-invdT-Hy | | fA-PO-mA-PO-dT-PO-dT-Hy | |
| 100 | Hy-mC-PO-mC-PO-mA-PO-fU- | 528 | Hy-fU-PO-fG-PO-mC-PO- | 742 |
| | PO-mA-PO-fU-PO-mG-PO-fA- | | fU-PO-mU-PO-fC-PO-mA- | |
| | PO-mA-PO-fA-PO-mC-PO-fC- | | PO-fU-PO-mU-PO-fA-PO- | |
| | PO-mU-PO-fA-PO-mA-PO-fU- | | mG-PO-fG-PO-mU-PO-fU- | |
| | PO-mG-PO-fA-PO-mA-PO-fG- | | PO-mU-PO-fC-PO-mA-PO- | |
| | PO-mC-PO-fA-PO-invdT-Hy | | fU-PO-mA-PO-dT-PO-dT-Hy | |
| 101 | Hy-mC-PO-mC-PO-mA-PO-fA- | 529 | Hy-fC-PO-fU-PO-mG-PO- | 743 |
| | PO-mU-PO-fG-PO-mA-PO-fA- | | fC-PO-mU-PO-fU-PO-mC- | |
| | PO-mA-PO-fC-PO-mC-PO-fU- | | PO-fA-PO-mU-PO-fU-PO- | |
| | PO-mA-PO-fA-PO-mU-PO-fG- | | mA-PO-fG-PO-mG-PO-fU- | |
| | PO-mA-PO-fA-PO-mG-PO-fC- | | PO-mU-PO-fU-PO-mC-PO- | |
| | PO-mA-PO-fG-PO-invdT-Hy | | fA-PO-mU-PO-dT-PO-dT-Hy | |
| 102 | Hy-mC-PO-mC-PO-mA-PO-fU- | 530 | Hy-fA-PO-fA-PO-mG-PO- | 744 |
| | PO-mA-PO-fC-PO-mU-PO-fA- | | fU-PO-mC-PO-fA-PO-mA- | |
| | PO-mA-PO-fG-PO-mU-PO-fC- | | PO-fU-PO-mG-PO-fU-PO- | |
| | PO-mA-PO-fC-PO-mA-PO-fU- | | mG-PO-fA-PO-mC-PO-fU- | |
| | PO-mU-PO-fG-PO-mA-PO-fC- | | PO-mU-PO-fA-PO-mG-PO- | |
| | PO-mU-PO-fU-PO-invdT-Hy | | fU-PO-mA-PO-dT-PO-dT-Hy | |
| 103 | Hy-mC-PO-mC-PO-mA-PO-fA- | 531 | Hy-fA-PO-fA-PO-mA-PO- | 745 |
| | PO-mC-PO-fU-PO-mA-PO-fA- | | fG-PO-mU-PO-fC-PO-mA- | |
| | PO-mG-PO-fU-PO-mC-PO-fA- | | PO-fA-PO-mU-PO-fG-PO- | |
| | PO-mC-PO-fA-PO-mU-PO-fU- | | mU-PO-fG-PO-mA-PO-fC- | |
| | PO-mG-PO-fA-PO-mC-PO-fU- | | PO-mU-PO-fU-PO-mA-PO- | |
| | PO-mU-PO-fU-PO-invdT-Hy | | fG-PO-mU-PO-dT-PO-dT-Hy | |
| 104 | Hy-mC-PO-mC-PO-mA-PO-fC- | 532 | Hy-fU-PO-fA-PO-mA-PO- | 746 |
| | PO-mU-PO-fA-PO-mA-PO-fG- | | fA-PO-mG-PO-fU-PO-mC- | |
| | PO-mU-PO-fC-PO-mA-PO-fC- | | PO-fA-PO-mA-PO-fU-PO- | |
| | PO-mA-PO-fU-PO-mU-PO-fG- | | mG-PO-fU-PO-mG-PO-fA- | |
| | PO-mA-PO-fC-PO-mU-PO-fU- | | PO-mC-PO-fU-PO-mU-PO- | |
| | PO-mU-PO-fA-PO-invdT-Hy | | fA-PO-mG-PO-dT-PO-dT-Hy | |
| 105 | Hy-mC-PO-mC-PO-mA-PO-fU- | 533 | Hy-fU-PO-fU-PO-mA-PO- | 747 |
| | PO-mA-PO-fA-PO-mG-PO-fU- | | fA-PO-mA-PO-fG-PO-mU- | |
| | PO-mC-PO-fA-PO-mC-PO-fA- | | PO-fC-PO-mA-PO-fA-PO- | |
| | PO-mU-PO-fU-PO-mG-PO-fA- | | mU-PO-fG-PO-mU-PO-fG- | |
| | PO-mC-PO-fU-PO-mU-PO-fU- | | PO-mA-PO-fC-PO-mU-PO- | |
| | PO-mA-PO-fA-PO-invdT-Hy | | fU-PO-mA-PO-dT-PO-dT-Hy | |
| 106 | Hy-mC-PO-mC-PO-mA-PO-fG- | 534 | Hy-fU-PO-fA-PO-mA-PO- | 748 |
| | PO-mA-PO-fG-PO-mG-PO-fU- | | fG-PO-mG-PO-fU-PO-mA- | |
| | PO-mA-PO-fU-PO-mC-PO-fA- | | PO-fU-PO-mA-PO-fG-PO- | |
| | PO-mC-PO-fU-PO-mA-PO-fU- | | mU-PO-fG-PO-mA-PO-fU- | |
| | PO-mA-PO-fC-PO-mC-PO-fU- | | PO-mA-PO-fC-PO-mC-PO- | |
| | PO-mU-PO-fA-PO-invdT-Hy | | fU-PO-mC-PO-dT-PO-dT-Hy | |
| 107 | Hy-mC-PO-mC-PO-mA-PO-fC- | 535 | Hy-fU-PO-fU-PO-mG-PO- | 749 |
| | PO-mU-PO-fU-PO-mA-PO-fA- | | fU-PO-mU-PO-fU-PO-mU- | |
| | PO-mU-PO-fA-PO-mC-PO-fU- | | PO-fC-PO-mA-PO-fU-PO- | |
| | PO-mA-PO-fU-PO-mG-PO-fA- | | mA-PO-fG-PO-mU-PO-fA- | |
| | PO-mA-PO-fA-PO-mA-PO-fC- | | PO-mU-PO-fU-PO-mA-PO- | |
| | PO-mA-PO-fA-PO-invdT-Hy | | fA-PO-mG-PO-dT-PO-dT-Hy | |
| 108 | Hy-mC-PO-mC-PO-mA-PO-fC- | 536 | Hy-fU-PO-fA-PO-mU-PO- | 750 |
| | PO-mA-PO-fU-PO-mC-PO-fG- | | fA-PO-mA-PO-fA-PO-mC- | |
| | PO-mA-PO-fG-PO-mU-PO-fU- | | PO-fU-PO-mU-PO-fU-PO- | |
| | PO-mA-PO-fA-PO-mA-PO-fG- | | mA-PO-fA-PO-mC-PO-fU- | |
| | PO-mU-PO-fU-PO-mU-PO-fA- | | PO-mC-PO-fG-PO-mA-PO- | |
| | PO-mU-PO-fA-PO-invdT-Hy | | fU-PO-mG-PO-dT-PO-dT-Hy | |
| 109 | Hy-mC-PO-mC-PO-mA-PO-fA- | 537 | Hy-fA-PO-fU-PO-mA-PO- | 751 |
| | PO-mU-PO-fC-PO-mG-PO-fA- | | fU-PO-mA-PO-fA-PO-mA- | |
| | PO-mG-PO-fU-PO-mU-PO-fA- | | PO-fC-PO-mU-PO-fU-PO- | |
| | PO-mA-PO-fA-PO-mG-PO-fU- | | mU-PO-fA-PO-mA-PO-fC- | |
| | PO-mU-PO-fU-PO-mA-PO-fU- | | PO-mU-PO-fC-PO-mG-PO- | |
| | PO-mA-PO-fU-PO-invdT-Hy | | fA-PO-mU-PO-dT-PO-dT-Hy | |
| 110 | Hy-mC-PO-mC-PO-mA-PO-fU- | 538 | Hy-fA-PO-fA-PO-mU-PO- | 752 |
| | PO-mC-PO-fG-PO-mA-PO-fG- | | fA-PO-mU-PO-fA-PO-mA- | |
| | PO-mU-PO-fU-PO-mA-PO-fA- | | PO-fA-PO-mC-PO-fU-PO- | |
| | PO-mA-PO-fG-PO-mU-PO-fU- | | mU-PO-fU-PO-mA-PO-fA- | |
| | PO-mU-PO-fA-PO-mU-PO-fA- | | PO-mC-PO-fU-PO-mC-PO- | |
| | PO-mU-PO-fU-PO-invdT-Hy | | fG-PO-mA-PO-dT-PO-dT-Hy | |
| 111 | Hy-mC-PO-mC-PO-mA-PO-fC- | 539 | Hy-fA-PO-fA-PO-mA-PO- | 753 |
| | PO-mG-PO-fA-PO-mG-PO-fU- | | fU-PO-mA-PO-fU-PO-mA- | |
| | PO-mU-PO-fA-PO-mA-PO-fA- | | PO-fA-PO-mA-PO-fC-PO- | |
| | PO-mG-PO-fU-PO-mU-PO-fU- | | mU-PO-fU-PO-mU-PO-fA- | |
| | PO-mA-PO-fU-PO-mA-PO-fU- | | PO-mA-PO-fC-PO-mU-PO- | |
| | PO-mU-PO-fU-PO-invdT-Hy | | fC-PO-mG-PO-dT-PO-dT-Hy | |
| 112 | Hy-mC-PO-mC-PO-mA-PO-fA- | 540 | Hy-fU-PO-fU-PO-mA-PO- | 754 |
| | PO-mA-PO-fG-PO-mU-PO-fU- | | fG-PO-mG-PO-fG-PO-mG- | |
| | PO-mU-PO-fA-PO-mU-PO-fA- | | PO-fA-PO-mA-PO-fA-PO- | |
| | PO-mU-PO-fU-PO-mU-PO-fC- | | mU-PO-fA-PO-mU-PO-fA- | |
| | PO-mC-PO-fC-PO-mC-PO-fU- | | PO-mA-PO-fA-PO-mC-PO- | |
| | PO-mA-PO-fA-PO-invdT-Hy | | fU-PO-mU-PO-dT-PO-dT-Hy | |
| 113 | Hy-mC-PO-mC-PO-mA-PO-fA- | 541 | Hy-fU-PO-fU-PO-mU-PO- | 755 |
| | PO-mG-PO-fU-PO-mU-PO-fU- | | fA-PO-mG-PO-fG-PO-mG- | |
| | PO-mA-PO-fU-PO-mA-PO-fU- | | PO-fG-PO-mA-PO-fA-PO- | |
| | PO-mU-PO-fU-PO-mC-PO-fC- | | mA-PO-fU-PO-mA-PO-fU- | |
| | PO-mC-PO-fC-PO-mU-PO-fA- | | PO-mA-PO-fA-PO-mA-PO- | |
| | PO-mA-PO-fA-PO-invdT-Hy | | fC-PO-mU-PO-dT-PO-dT-Hy | |
| 114 | Hy-mC-PO-mC-PO-mA-PO-fA- | 542 | Hy-fC-PO-fA-PO-mG-PO- | 756 |
| | PO-mU-PO-fU-PO-mU-PO-fC- | | fC-PO-mA-PO-fU-PO-mA- | |
| | PO-mC-PO-fC-PO-mC-PO-fU- | | PO-fU-PO-mU-PO-fU-PO- | |
| | PO-mA-PO-fA-PO-mA-PO-fU- | | mA-PO-fG-PO-mG-PO-fG- | |
| | PO-mA-PO-fU-PO-mG-PO-fC- | | PO-mG-PO-fA-PO-mA-PO- | |
| | PO-mU-PO-fG-PO-invdT-Hy | | fA-PO-mU-PO-dT-PO-dT-Hy | |
| 115 | Hy-mC-PO-mC-PO-mA-PO-fC- | 543 | Hy-fA-PO-fA-PO-mU-PO- | 757 |
| | PO-mC-PO-fC-PO-mU-PO-fA- | | fC-PO-mU-PO-fU-PO-mU- | |
| | PO-mA-PO-fA-PO-mU-PO-fC- | | PO-fA-PO-mG-PO-fG-PO- | |
| | PO-mC-PO-fC-PO-mU-PO-fA- | | mG-PO-fA-PO-mU-PO-fU- | |
| | PO-mA-PO-fA-PO-mG-PO-fA- | | PO-mU-PO-fA-PO-mG-PO- | |
| | PO-mU-PO-fU-PO-invdT-Hy | | fG-PO-mG-PO-dT-PO-dT-Hy | |
| 116 | Hy-mC-PO-mC-PO-mA-PO-fC- | 544 | Hy-fU-PO-fA-PO-mA-PO- | 758 |
| | PO-mC-PO-fU-PO-mA-PO-fA- | | fU-PO-mC-PO-fU-PO-mU- | |
| | PO-mA-PO-fU-PO-mC-PO-fC- | | PO-fU-PO-mA-PO-fG-PO- | |
| | PO-mC-PO-fU-PO-mA-PO-fA- | | mG-PO-fG-PO-mA-PO-fU- | |
| | PO-mA-PO-fG-PO-mA-PO-fU- | | PO-mU-PO-fU-PO-mA-PO- | |
| | PO-mU-PO-fA-PO-invdT-Hy | | fG-PO-mG-PO-dT-PO-dT-Hy | |
| 117 | Hy-mC-PO-mC-PO-mA-PO-fC- | 545 | Hy-fC-PO-fU-PO-mA-PO- | 759 |
| | PO-mU-PO-fA-PO-mA-PO-fA- | | fA-PO-mU-PO-fC-PO-mU- | |
| | PO-mU-PO-fC-PO-mC-PO-fC- | | PO-fU-PO-mU-PO-fA-PO- | |
| | PO-mU-PO-fA-PO-mA-PO-fA- | | mG-PO-fG-PO-mG-PO-fA- | |
| | PO-mG-PO-fA-PO-mU-PO-fU- | | PO-mU-PO-fU-PO-mU-PO- | |
| | PO-mA-PO-fG-PO-invdT-Hy | | fA-PO-mG-PO-dT-PO-dT-Hy | |
| 118 | Hy-mC-PO-mC-PO-mA-PO-fU- | 546 | Hy-fU-PO-fC-PO-mU-PO- | 760 |
| | PO-mA-PO-fA-PO-mA-PO-fU- | | fA-PO-mA-PO-fU-PO-mC- | |
| | PO-mC-PO-fC-PO-mC-PO-fU- | | PO-fU-PO-mU-PO-fU-PO- | |
| | PO-mA-PO-fA-PO-mA-PO-fG- | | mA-PO-fG-PO-mG-PO-fG- | |
| | PO-mA-PO-fU-PO-mU-PO-fA- | | PO-mA-PO-fU-PO-mU-PO- | |
| | PO-mG-PO-fA-PO-invdT-Hy | | fU-PO-mA-PO-dT-PO-dT-Hy | |
| 119 | Hy-mC-PO-mC-PO-mA-PO-fA- | 547 | Hy-fA-PO-fU-PO-mC-PO- | 761 |
| | PO-mA-PO-fA-PO-mU-PO-fC- | | fU-PO-mA-PO-fA-PO-mU- | |
| | PO-mC-PO-fC-PO-mU-PO-fA- | | PO-fC-PO-mU-PO-fU-PO- | |
| | PO-mA-PO-fA-PO-mG-PO-fA- | | mU-PO-fA-PO-mG-PO-fG- | |
| | PO-mU-PO-fU-PO-mA-PO-fG- | | PO-mG-PO-fA-PO-mU-PO- | |
| | PO-mA-PO-fU-PO-invdT-Hy | | fU-PO-mU-PO-dT-PO-dT-Hy | |
| 120 | Hy-mC-PO-mC-PO-mA-PO-fU- | 548 | Hy-fC-PO-fU-PO-mU-PO- | 762 |
| | PO-mU-PO-fA-PO-mA-PO-fA- | | fU-PO-mA-PO-fA-PO-mC- | |
| | PO-mC-PO-fC-PO-mC-PO-fA- | | PO-fA-PO-mA-PO-fA-PO- | |
| | PO-mU-PO-fU-PO-mU-PO-fG- | | mU-PO-fG-PO-mG-PO-fG- | |
| | PO-mU-PO-fU-PO-mA-PO-fA- | | PO-mU-PO-fU-PO-mU-PO- | |
| | PO-mA-PO-fG-PO-invdT-Hy | | fA-PO-mA-PO-dT-PO-dT-Hy | |
| 121 | Hy-mC-PO-mC-PO-mA-PO-fU- | 549 | Hy-fC-PO-fA-PO-mC-PO- | 763 |
| | PO-mU-PO-fU-PO-mG-PO-fU- | | fU-PO-mA-PO-fU-PO-mA- | |
| | PO-mU-PO-fA-PO-mA-PO-fA- | | PO-fU-PO-mC-PO-fC-PO- | |
| | PO-mG-PO-fG-PO-mA-PO-fU- | | mU-PO-fU-PO-mU-PO-fA- | |
| | PO-mA-PO-fU-PO-mA-PO-fG- | | PO-mA-PO-fC-PO-mA-PO- | |
| | PO-mU-PO-fG-PO-invdT-Hy | | fA-PO-mA-PO-dT-PO-dT-Hy | |
| 122 | Hy-mC-PO-mC-PO-mA-PO-fU- | 550 | Hy-fG-PO-fC-PO-mA-PO- | 764 |
| | PO-mU-PO-fG-PO-mU-PO-fU- | | fC-PO-mU-PO-fA-PO-mU- | |
| | PO-mA-PO-fA-PO-mA-PO-fG- | | PO-fA-PO-mU-PO-fC-PO- | |
| | PO-mG-PO-fA-PO-mU-PO-fA- | | mC-PO-fU-PO-mU-PO-fU- | |
| | PO-mU-PO-fA-PO-mG-PO-fU- | | PO-mA-PO-fA-PO-mC-PO- | |
| | PO-mG-PO-fC-PO-invdT-Hy | | fA-PO-mA-PO-dT-PO-dT-Hy | |
| 123 | Hy-mC-PO-mC-PO-mA-PO-fU- | 551 | Hy-fG-PO-fG-PO-mC-PO- | 765 |
| | PO-mG-PO-fU-PO-mU-PO-fA- | | fA-PO-mC-PO-fU-PO-mA- | |
| | PO-mA-PO-fA-PO-mG-PO-fG- | | PO-fU-PO-mA-PO-fU-PO- | |
| | PO-mA-PO-fU-PO-mA-PO-fU- | | mC-PO-fC-PO-mU-PO-fU- | |
| | PO-mA-PO-fG-PO-mU-PO-fG- | | PO-mU-PO-fA-PO-mA-PO- | |
| | PO-mC-PO-fC-PO-invdT-Hy | | fC-PO-mA-PO-dT-PO-dT-Hy | |
| 124 | Hy-mC-PO-mC-PO-mA-PO-fG- | 552 | Hy-fG-PO-fG-PO-mG-PO- | 766 |
| | PO-mU-PO-fU-PO-mA-PO-fA- | | fC-PO-mA-PO-fC-PO-mU- | |
| | PO-mA-PO-fG-PO-mG-PO-fA- | | PO-fA-PO-mU-PO-fA-PO- | |
| | PO-mU-PO-fA-PO-mU-PO-fA- | | mU-PO-fC-PO-mC-PO-fU- | |
| | PO-mG-PO-fU-PO-mG-PO-fC- | | PO-mU-PO-fU-PO-mA-PO- | |
| | PO-mC-PO-fC-PO-invdT-Hy | | fA-PO-mC-PO-dT-PO-dT-Hy | |
| 125 | Hy-mC-PO-mC-PO-mA-PO-fU- | 553 | Hy-fU-PO-fG-PO-mG-PO- | 767 |
| | PO-mU-PO-fA-PO-mA-PO-fA- | | fG-PO-mC-PO-fA-PO-mC- | |
| | PO-mG-PO-fG-PO-mA-PO-fU- | | PO-fU-PO-mA-PO-fU-PO- | |
| | PO-mA-PO-fU-PO-mA-PO-fG- | | mA-PO-fU-PO-mC-PO-fC- | |
| | PO-mU-PO-fG-PO-mC-PO-fC- | | PO-mU-PO-fU-PO-mU-PO- | |
| | PO-mC-PO-fA-PO-invdT-Hy | | fA-PO-mA-PO-dT-PO-dT-Hy | |
| 126 | Hy-mC-PO-mC-PO-mA-PO-fU- | 554 | Hy-fU-PO-fU-PO-mG-PO- | 768 |
| | PO-mA-PO-fA-PO-mA-PO-fG- | | fG-PO-mG-PO-fC-PO-mA- | |
| | PO-mG-PO-fA-PO-mU-PO-fA- | | PO-fC-PO-mU-PO-fA-PO- | |
| | PO-mU-PO-fA-PO-mG-PO-fU- | | mU-PO-fA-PO-mU-PO-fC- | |
| | PO-mG-PO-fC-PO-mC-PO-fC- | | PO-mC-PO-fU-PO-mU-PO- | |
| | PO-mA-PO-fA-PO-invdT-Hy | | fU-PO-mA-PO-dT-PO-dT-Hy | |
| 127 | Hy-mC-PO-mC-PO-mA-PO-fA- | 555 | Hy-fA-PO-fA-PO-mC-PO- | 769 |
| | PO-mG-PO-fG-PO-mA-PO-fU- | | fU-PO-mU-PO-fG-PO-mG- | |
| | PO-mA-PO-fU-PO-mA-PO-fG- | | PO-fG-PO-mC-PO-fA-PO- | |
| | PO-mU-PO-fG-PO-mC-PO-fC- | | mC-PO-fU-PO-mA-PO-fU- | |
| | PO-mC-PO-fA-PO-mA-PO-fG- | | PO-mA-PO-fU-PO-mC-PO- | |
| | PO-mU-PO-fU-PO-invdT-Hy | | fC-PO-mU-PO-dT-PO-dT-Hy | |
| 128 | Hy-mC-PO-mC-PO-mA-PO-fG- | 556 | Hy-fU-PO-fA-PO-mA-PO- | 770 |
| | PO-mG-PO-fA-PO-mU-PO-fA- | | fC-PO-mU-PO-fU-PO-mG- | |
| | PO-mU-PO-fA-PO-mG-PO-fU- | | PO-fG-PO-mG-PO-fC-PO- | |
| | PO-mG-PO-fC-PO-mC-PO-fC- | | mA-PO-fC-PO-mU-PO-fA- | |
| | PO-mA-PO-fA-PO-mG-PO-fU- | | PO-mU-PO-fA-PO-mU-PO- | |
| | PO-mU-PO-fA-PO-invdT-Hy | | fC-PO-mC-PO-dT-PO-dT-Hy | |
| 129 | Hy-mC-PO-mC-PO-mA-PO-fG- | 557 | Hy-fA-PO-fU-PO-mA-PO- | 771 |
| | PO-mA-PO-fU-PO-mA-PO-fU- | | fA-PO-mC-PO-fU-PO-mU- | |
| | PO-mA-PO-fG-PO-mU-PO-fG- | | PO-fG-PO-mG-PO-fG-PO- | |
| | PO-mC-PO-fC-PO-mC-PO-fA- | | mC-PO-fA-PO-mC-PO-fU- | |
| | PO-mA-PO-fG-PO-mU-PO-fU- | | PO-mA-PO-fU-PO-mA-PO- | |
| | PO-mA-PO-fU-PO-invdT-Hy | | fU-PO-mC-PO-dT-PO-dT-Hy | |
| 130 | Hy-mC-PO-mC-PO-mA-PO-fA- | 558 | Hy-fU-PO-fA-PO-mU-PO- | 772 |
| | PO-mU-PO-fA-PO-mU-PO-fA- | | fA-PO-mA-PO-fC-PO-mU- | |
| | PO-mG-PO-fU-PO-mG-PO-fC- | | PO-fU-PO-mG-PO-fG-PO- | |
| | PO-mC-PO-fC-PO-mA-PO-fA- | | mG-PO-fC-PO-mA-PO-fC- | |
| | PO-mG-PO-fU-PO-mU-PO-fA- | | PO-mU-PO-fA-PO-mU-PO- | |
| | PO-mU-PO-fA-PO-invdT-Hy | | fA-PO-mU-PO-dT-PO-dT-Hy | |
| 131 | Hy-mC-PO-mC-PO-mA-PO-fG- | 559 | Hy-fU-PO-fU-PO-mG-PO- | 773 |
| | PO-mG-PO-fU-PO-mG-PO-fA- | | fA-PO-mC-PO-fA-PO-mA- | |
| | PO-mC-PO-fC-PO-mU-PO-fA- | | PO-fA-PO-mG-PO-fG-PO- | |
| | PO-mC-PO-fC-PO-mU-PO-fU- | | mU-PO-fA-PO-mG-PO-fG- | |
| | PO-mU-PO-fG-PO-mU-PO-fC- | | PO-mU-PO-fC-PO-mA-PO- | |
| | PO-mA-PO-fA-PO-invdT-Hy | | fC-PO-mC-PO-dT-PO-dT-Hy | |
| 132 | Hy-mC-PO-mC-PO-mA-PO-fG- | 560 | Hy-fA-PO-fU-PO-mU-PO- | 774 |
| | PO-mU-PO-fG-PO-mA-PO-fC- | | fG-PO-mA-PO-fC-PO-mA- | |
| | PO-mC-PO-fU-PO-mA-PO-fC- | | PO-fA-PO-mA-PO-fG-PO- | |
| | PO-mC-PO-fU-PO-mU-PO-fU- | | mG-PO-fU-PO-mA-PO-fG- | |
| | PO-mG-PO-fU-PO-mC-PO-fA- | | PO-mG-PO-fU-PO-mC-PO- | |
| | PO-mA-PO-fU-PO-invdT-Hy | | fA-PO-mC-PO-dT-PO-dT-Hy | |
| 133 | Hy-mC-PO-mC-PO-mA-PO-fU- | 561 | Hy-fU-PO-fA-PO-mU-PO- | 775 |
| | PO-mG-PO-fA-PO-mC-PO-fC- | | fU-PO-mG-PO-fA-PO-mC- | |
| | PO-mU-PO-fA-PO-mC-PO-fC- | | PO-fA-PO-mA-PO-fA-PO- | |
| | PO-mU-PO-fU-PO-mU-PO-fG- | | mG-PO-fG-PO-mU-PO-fA- | |
| | PO-mU-PO-fC-PO-mA-PO-fA- | | PO-mG-PO-fG-PO-mU-PO- | |
| | PO-mU-PO-fA-PO-invdT-Hy | | fC-PO-mA-PO-dT-PO-dT-Hy | |
| 134 | Hy-mC-PO-mC-PO-mA-PO-fA- | 562 | Hy-fU-PO-fG-PO-mG-PO- | 776 |
| | PO-mU-PO-fG-PO-mU-PO-fA- | | fA-PO-mU-PO-fA-PO-mA- | |
| | PO-mU-PO-fU-PO-mU-PO-fC- | | PO-fU-PO-mU-PO-fU-PO- | |
| | PO-mA-PO-fA-PO-mA-PO-fU- | | mG-PO-fA-PO-mA-PO-fA- | |
| | PO-mU-PO-fA-PO-mU-PO-fC- | | PO-mU-PO-fA-PO-mC-PO- | |
| | PO-mC-PO-fA-PO-invdT-Hy | | fA-PO-mU-PO-dT-PO-dT-Hy | |
| 135 | Hy-mC-PO-mC-PO-mA-PO-fU- | 563 | Hy-fG-PO-fU-PO-mA-PO- | 777 |
| | PO-mU-PO-fC-PO-mA-PO-fA- | | fU-PO-mA-PO-fU-PO-mU- | |
| | PO-mA-PO-fU-PO-mU-PO-fA- | | PO-fG-PO-mG-PO-fA-PO- | |
| | PO-mU-PO-fC-PO-mC-PO-fA- | | mU-PO-fA-PO-mA-PO-fU- | |
| | PO-mA-PO-fU-PO-mA-PO-fU- | | PO-mU-PO-fU-PO-mG-PO- | |
| | PO-mA-PO-fC-PO-invdT-Hy | | fA-PO-mA-PO-dT-PO-dT-Hy | |
| 136 | Hy-mC-PO-mC-PO-mA-PO-fU- | 564 | Hy-fU-PO-fG-PO-mU-PO- | 778 |
| | PO-mC-PO-fA-PO-mA-PO-fA- | | fA-PO-mU-PO-fA-PO-mU- | |
| | PO-mU-PO-fU-PO-mA-PO-fU- | | PO-fU-PO-mG-PO-fG-PO- | |
| | PO-mC-PO-fC-PO-mA-PO-fA- | | mA-PO-fU-PO-mA-PO-fA- | |
| | PO-mU-PO-fA-PO-mU-PO-fA- | | PO-mU-PO-fU-PO-mU-PO- | |
| | PO-mC-PO-fA-PO-invdT-Hy | | fG-PO-mA-PO-dT-PO-dT-Hy | |
| 137 | Hy-mC-PO-mC-PO-mA-PO-fA- | 565 | Hy-fG-PO-fA-PO-mC-PO- | 779 |
| | PO-mU-PO-fU-PO-mA-PO-fU- | | £A-PO-mU-PO-fG-PO-mU- | |
| | PO-mC-PO-fC-PO-mA-PO-fA- | | PO-fA-PO-mU-PO-fA-PO- | |
| | PO-mU-PO-fA-PO-mU-PO-fA- | | mU-PO-fU-PO-mG-PO-fG- | |
| | PO-mC-PO-fA-PO-mU-PO-fG- | | PO-mA-PO-fU-PO-mA-PO- | |
| | PO-mU-PO-fC-PO-invdT-Hy | | fA-PO-mU-PO-dT-PO-dT-Hy | |
| 138 | Hy-mC-PO-mC-PO-mA-PO-fU- | 566 | Hy-fU-PO-fG-PO-mA-PO- | 780 |
| | PO-mU-PO-fA-PO-mU-PO-fC- | | fC-PO-mA-PO-fU-PO-mG- | |
| | PO-mC-PO-fA-PO-mA-PO-fU- | | PO-fU-PO-mA-PO-fU-PO- | |
| | PO-mA-PO-fU-PO-mA-PO-fC- | | mA-PO-fU-PO-mU-PO-fG- | |
| | PO-mA-PO-fU-PO-mG-PO-fU- | | PO-mG-PO-fA-PO-mU-PO- | |
| | PO-mC-PO-fA-PO-invdT-Hy | | fA-PO-mA-PO-dT-PO-dT-Hy | |
| 139 | Hy-mC-PO-mC-PO-mA-PO-fU- | 567 | Hy-fA-PO-fU-PO-mG-PO- | 781 |
| | PO-mA-PO-fU-PO-mC-PO-fC- | | fA-PO-mC-PO-fA-PO-mU- | |
| | PO-mA-PO-fA-PO-mU-PO-fA- | | PO-fG-PO-mU-PO-fA-PO- | |
| | PO-mU-PO-fA-PO-mC-PO-fA- | | mU-PO-fA-PO-mU-PO-fU- | |
| | PO-mU-PO-fG-PO-mU-PO-fC- | | PO-mG-PO-fG-PO-mA-PO- | |
| | PO-mA-PO-fU-PO-invdT-Hy | | fU-PO-mA-PO-dT-PO-dT-Hy | |
| 140 | Hy-mC-PO-mC-PO-mA-PO-fC- | 568 | Hy-fU-PO-fA-PO-mA-PO- | 782 |
| | PO-mA-PO-fU-PO-mG-PO-fU- | | fA-PO-mA-PO-fA-PO-mU- | |
| | PO-mC-PO-fA-PO-mU-PO-fA- | | PO-fA-PO-mU-PO-fA-PO- | |
| | PO-mU-PO-fA-PO-mU-PO-fA- | | mU-PO-fA-PO-mU-PO-fG- | |
| | PO-mU-PO-fU-PO-mU-PO-fU- | | PO-mA-PO-fC-PO-mA-PO- | |
| | PO-mU-PO-fA-PO-invdT-Hy | | fU-PO-mG-PO-dT-PO-dT-Hy | |
| 141 | Hy-mC-PO-mC-PO-mA-PO-fA- | 569 | Hy-fA-PO-fC-PO-mC-PO- | 783 |
| | PO-mG-PO-fU-PO-mA-PO-fC- | | fU-PO-mU-PO-fU-PO-mA- | |
| | PO-mA-PO-fA-PO-mA-PO-fA- | | PO-fU-PO-mU-PO-fA-PO- | |
| | PO-mU-PO-fA-PO-mA-PO-fU- | | mU-PO-fU-PO-mU-PO-fU- | |
| | PO-mA-PO-fA-PO-mA-PO-fG- | | PO-mG-PO-fU-PO-mA-PO- | |
| | PO-mG-PO-fU-PO-invdT-Hy | | fC-PO-mU-PO-dT-PO-dT-Hy | |
| 142 | Hy-mC-PO-mC-PO-mA-PO-fG- | 570 | Hy-fU-PO-fA-PO-mC-PO- | 784 |
| | PO-mU-PO-fA-PO-mC-PO-fA- | | fC-PO-mU-PO-fU-PO-mU- | |
| | PO-mA-PO-fA-PO-mA-PO-fU- | | PO-fA-PO-mU-PO-fU-PO- | |
| | PO-mA-PO-fA-PO-mU-PO-fA- | | mA-PO-fU-PO-mU-PO-fU- | |
| | PO-mA-PO-fA-PO-mG-PO-fG- | | PO-mU-PO-fG-PO-mU-PO- | |
| | PO-mU-PO-fA-PO-invdT-Hy | | fA-PO-mC-PO-dT-PO-dT-Hy | |
| 143 | Hy-mC-PO-mC-PO-mA-PO-fA- | 571 | Hy-fC-PO-fU-PO-mG-PO- | 785 |
| | PO-mU-PO-fA-PO-mA-PO-fU- | | fU-PO-mG-PO-fG-PO-mU- | |
| | PO-mU-PO-fU-PO-mU-PO-fC- | | PO-fC-PO-mC-PO-fU-PO- | |
| | PO-mA-PO-fG-PO-mG-PO-fA- | | mG-PO-fA-PO-mA-PO-fA- | |
| | PO-mC-PO-fC-PO-mA-PO-fC- | | PO-mA-PO-fU-PO-mU-PO- | |
| | PO-mA-PO-fG-PO-invdT-Hy | | fA-PO-mU-PO-dT-PO-dT-Hy | |
| 144 | Hy-mC-PO-mC-PO-mA-PO-fA- | 572 | Hy-fG-PO-fU-PO-mC-PO- | 786 |
| | PO-mA-PO-fU-PO-mU-PO-fU- | | fU-PO-mG-PO-fU-PO-mG- | |
| | PO-mU-PO-fC-PO-mA-PO-fG- | | PO-fG-PO-mU-PO-fC-PO- | |
| | PO-mG-PO-fA-PO-mC-PO-fC- | | mC-PO-fU-PO-mG-PO-fA- | |
| | PO-mA-PO-fC-PO-mA-PO-fG- | | PO-mA-PO-fA-PO-mA-PO- | |
| | PO-mA-PO-fC-PO-invdT-Hy | | fU-PO-mU-PO-dT-PO-dT-Hy | |
| 145 | Hy-mC-PO-mC-PO-mA-PO-fU- | 573 | Hy-fU-PO-fA-PO-mG-PO- | 787 |
| | PO-mU-PO-fU-PO-mU-PO-fC- | | fU-PO-mC-PO-fU-PO-mG- | |
| | PO-mA-PO-fG-PO-mG-PO-fA- | | PO-fU-PO-mG-PO-fG-PO- | |
| | PO-mC-PO-fC-PO-mA-PO-fC- | | mU-PO-fC-PO-mC-PO-fU- | |
| | PO-mA-PO-fG-PO-mA-PO-fC- | | PO-mG-PO-fA-PO-mA-PO- | |
| | PO-mU-PO-fA-PO-invdT-Hy | | fA-PO-mA-PO-dT-PO-dT-Hy | |
| 146 | Hy-mC-PO-mC-PO-mA-PO-fU- | 574 | Hy-fU-PO-fU-PO-mA-PO- | 788 |
| | PO-mU-PO-fU-PO-mC-PO-fA- | | fG-PO-mU-PO-fC-PO-mU- | |
| | PO-mG-PO-fG-PO-mA-PO-fC- | | PO-fG-PO-mU-PO-fG-PO- | |
| | PO-mC-PO-fA-PO-mC-PO-fA- | | mG-PO-fU-PO-mC-PO-fC- | |
| | PO-mG-PO-fA-PO-mC-PO-fU- | | PO-mU-PO-fG-PO-mA-PO- | |
| | PO-mA-PO-fA-PO-invdT-Hy | | fA-PO-mA-PO-dT-PO-dT-Hy | |
| 147 | Hy-mC-PO-mC-PO-mA-PO-fU- | 575 | Hy-fC-PO-fU-PO-mU-PO- | 789 |
| | PO-mU-PO-fC-PO-mA-PO-fG- | | fA-PO-mG-PO-fU-PO-mC- | |
| | PO-mG-PO-fA-PO-mC-PO-fC- | | PO-fU-PO-mG-PO-fU-PO- | |
| | PO-mA-PO-fC-PO-mA-PO-fG- | | mG-PO-fG-PO-mU-PO-fC- | |
| | PO-mA-PO-fC-PO-mU-PO-fA- | | PO-mC-PO-fU-PO-mG-PO- | |
| | PO-mA-PO-fG-PO-invdT-Hy | | fA-PO-mA-PO-dT-PO-dT-Hy | |
| 148 | Hy-mC-PO-mC-PO-mA-PO-fU- | 576 | Hy-fG-PO-fC-PO-mU-PO- | 790 |
| | PO-mC-PO-fA-PO-mG-PO-fG- | | fU-PO-mA-PO-fG-PO-mU- | |
| | PO-mA-PO-fC-PO-mC-PO-fA- | | PO-fC-PO-mU-PO-fG-PO- | |
| | PO-mC-PO-fA-PO-mG-PO-fA- | | mU-PO-fG-PO-mG-PO-fU- | |
| | PO-mC-PO-fU-PO-mA-PO-fA- | | PO-mC-PO-fC-PO-mU-PO- | |
| | PO-mG-PO-fC-PO-invdT-Hy | | fG-PO-mA-PO-dT-PO-dT-Hy | |
| 149 | Hy-mC-PO-mC-PO-mA-PO-fA- | 577 | Hy-fC-PO-fA-PO-mG-PO- | 791 |
| | PO-mG-PO-fG-PO-mA-PO-fC- | | fC-PO-mU-PO-fU-PO-mA- | |
| | PO-mC-PO-fA-PO-mC-PO-fA- | | PO-fG-PO-mU-PO-fC-PO- | |
| | PO-mG-PO-fA-PO-mC-PO-fU- | | mU-PO-fG-PO-mU-PO-fG- | |
| | PO-mA-PO-fA-PO-mG-PO-fC- | | PO-mG-PO-fU-PO-mC-PO- | |
| | PO-mU-PO-fG-PO-invdT-Hy | | fC-PO-mU-PO-dT-PO-dT-Hy | |
| 150 | Hy-mC-PO-mC-PO-mA-PO-fG- | 578 | Hy-fA-PO-fC-PO-mA-PO- | 792 |
| | PO-mG-PO-fA-PO-mC-PO-fC- | | fG-PO-mC-PO-fU-PO-mU- | |
| | PO-mA-PO-fC-PO-mA-PO-fG- | | PO-fA-PO-mG-PO-fU-PO- | |
| | PO-mA-PO-fC-PO-mU-PO-fA- | | mC-PO-fU-PO-mG-PO-fU- | |
| | PO-mA-PO-fG-PO-mC-PO-fU- | | PO-mG-PO-fG-PO-mU-PO- | |
| | PO-mG-PO-fU-PO-invdT-Hy | | fC-PO-mC-PO-dT-PO-dT-Hy | |
| 151 | Hy-mC-PO-mC-PO-mA-PO-fG- | 579 | Hy-fG-PO-fA-PO-mC-PO- | 793 |
| | PO-mA-PO-fC-PO-mC-PO-fA- | | fA-PO-mG-PO-fC-PO-mU- | |
| | PO-mC-PO-fA-PO-mG-PO-fA- | | PO-fU-PO-mA-PO-fG-PO- | |
| | PO-mC-PO-fU-PO-mA-PO-fA- | | mU-PO-fC-PO-mU-PO-fG- | |
| | PO-mG-PO-fC-PO-mU-PO-fG- | | PO-mU-PO-fG-PO-mG-PO- | |
| | PO-mU-PO-fC-PO-invdT-Hy | | fU-PO-mC-PO-dT-PO-dT-Hy | |
| 152 | Hy-mC-PO-mC-PO-mA-PO-fU- | 580 | Hy-fG-PO-fU-PO-mA-PO- | 794 |
| | PO-mU-PO-fU-PO-mU-PO-fU- | | fU-PO-mU-PO-fC-PO-mU- | |
| | PO-mU-PO-fA-PO-mG-PO-fG- | | PO-fG-PO-mG-PO-fC-PO- | |
| | PO-mG-PO-fC-PO-mC-PO-fA- | | mC-PO-fC-PO-mU-PO-fA- | |
| | PO-mG-PO-fA-PO-mA-PO-fU- | | PO-mA-PO-fA-PO-mA-PO- | |
| | PO-mA-PO-fC-PO-invdT-Hy | | fA-PO-mA-PO-dT-PO-dT-Hy | |
| 153 | Hy-mC-PO-mC-PO-mA-PO-fU- | 581 | Hy-fG-PO-fG-PO-mU-PO- | 795 |
| | PO-mU-PO-fU-PO-mU-PO-fU- | | fA-PO-mU-PO-fU-PO-mC- | |
| | PO-mA-PO-fG-PO-mG-PO-fG- | | PO-fU-PO-mG-PO-fG-PO- | |
| | PO-mC-PO-fC-PO-mA-PO-fG- | | mC-PO-fC-PO-mC-PO-fU- | |
| | PO-mA-PO-fA-PO-mU-PO-fA- | | PO-mA-PO-fA-PO-mA-PO- | |
| | PO-mC-PO-fC-PO-invdT-Hy | | fA-PO-mA-PO-dT-PO-dT-Hy | |
| 154 | Hy-mC-PO-mC-PO-mA-PO-fU- | 582 | Hy-fU-PO-fG-PO-mG-PO- | 796 |
| | PO-mU-PO-fU-PO-mU-PO-fA- | | fU-PO-mA-PO-fU-PO-mU- | |
| | PO-mG-PO-fG-PO-mG-PO-fC- | | PO-fC-PO-mU-PO-fG-PO- | |
| | PO-mC-PO-fA-PO-mG-PO-fA- | | mG-PO-fC-PO-mC-PO-fC- | |
| | PO-mA-PO-fU-PO-mA-PO-fC- | | PO-mU-PO-fA-PO-mA-PO- | |
| | PO-mC-PO-fA-PO-invdT-Hy | | fA-PO-mA-PO-dT-PO-dT-Hy | |
| 155 | Hy-mC-PO-mC-PO-mA-PO-fU- | 583 | Hy-fU-PO-fU-PO-mG-PO- | 797 |
| | PO-mU-PO-fU-PO-mA-PO-fG- | | fG-PO-mU-PO-fA-PO-mU- | |
| | PO-mG-PO-fG-PO-mC-PO-fC- | | PO-fU-PO-mC-PO-fU-PO- | |
| | PO-mA-PO-fG-PO-mA-PO-fA- | | mG-PO-fG-PO-mC-PO-fC- | |
| | PO-mU-PO-fA-PO-mC-PO-fC- | | PO-mC-PO-fU-PO-mA-PO- | |
| | PO-mA-PO-fA-PO-invdT-Hy | | fA-PO-mA-PO-dT-PO-dT-Hy | |
| 156 | Hy-mC-PO-mC-PO-mA-PO-fU- | 584 | Hy-fU-PO-fU-PO-mU-PO- | 798 |
| | PO-mU-PO-fA-PO-mG-PO-fG- | | fG-PO-mG-PO-fU-PO-mA- | |
| | PO-mG-PO-fC-PO-mC-PO-fA- | | PO-fU-PO-mU-PO-fC-PO- | |
| | PO-mG-PO-fA-PO-mA-PO-fU- | | mU-PO-fG-PO-mG-PO-fC- | |
| | PO-mA-PO-fC-PO-mC-PO-fA- | | PO-mC-PO-fC-PO-mU-PO- | |
| | PO-mA-PO-fA-PO-invdT-Hy | | fA-PO-mA-PO-dT-PO-dT-Hy | |
| 157 | Hy-mC-PO-mC-PO-mA-PO-fU- | 585 | Hy-fU-PO-fU-PO-mU-PO- | 799 |
| | PO-mA-PO-fG-PO-mG-PO-fG- | | fU-PO-mG-PO-fG-PO-mU- | |
| | PO-mC-PO-fC-PO-mA-PO-fG- | | PO-fA-PO-mU-PO-fU-PO- | |
| | PO-mA-PO-fA-PO-mU-PO-fA- | | mC-PO-fU-PO-mG-PO-fG- | |
| | PO-mC-PO-fC-PO-mA-PO-fA- | | PO-mC-PO-fC-PO-mC-PO- | |
| | PO-mA-PO-fA-PO-invdT-Hy | | fU-PO-mA-PO-dT-PO-dT-Hy | |
| 158 | Hy-mC-PO-mC-PO-mA-PO-fA- | 586 | Hy-fA-PO-fU-PO-mU-PO- | 800 |
| | PO-mG-PO-fG-PO-mG-PO-fC- | | fU-PO-mU-PO-fG-PO-mG- | |
| | PO-mC-PO-fA-PO-mG-PO-fA- | | PO-fU-PO-mA-PO-fU-PO- | |
| | PO-mA-PO-fU-PO-mA-PO-fC- | | mU-PO-fC-PO-mU-PO-fG- | |
| | PO-mC-PO-fA-PO-mA-PO-fA- | | PO-mG-PO-fC-PO-mC-PO- | |
| | PO-mA-PO-fU-PO-invdT-Hy | | fC-PO-mU-PO-dT-PO-dT-Hy | |
| 159 | Hy-mC-PO-mC-PO-mA-PO-fA- | 587 | Hy-fA-PO-fU-PO-mU-PO- | 801 |
| | PO-mA-PO-fA-PO-mU-PO-fU- | | fU-PO-mG-PO-fA-PO-mA- | |
| | PO-mG-PO-fG-PO-mA-PO-fC- | | PO-fA-PO-mU-PO-fU-PO- | |
| | PO-mA-PO-fA-PO-mU-PO-fU- | | mG-PO-fU-PO-mC-PO-fC- | |
| | PO-mU-PO-fC-PO-mA-PO-fA- | | PO-mA-PO-fA-PO-mU-PO- | |
| | PO-mA-PO-fU-PO-invdT-Hy | | fU-PO-mU-PO-dT-PO-dT-Hy | |
| 160 | Hy-mC-PO-mC-PO-mA-PO-fA- | 588 | Hy-fG-PO-fC-PO-mA-PO- | 802 |
| | PO-mU-PO-fU-PO-mG-PO-fG- | | fU-PO-mU-PO-fU-PO-mG- | |
| | PO-mA-PO-fC-PO-mA-PO-fA- | | PO-fA-PO-mA-PO-fA-PO- | |
| | PO-mU-PO-fU-PO-mU-PO-fC- | | mU-PO-fU-PO-mG-PO-fU- | |
| | PO-mA-PO-fA-PO-mA-PO-fU- | | PO-mC-PO-fC-PO-mA-PO- | |
| | PO-mG-PO-fC-PO-invdT-Hy | | fA-PO-mU-PO-dT-PO-dT-Hy | |
| 161 | Hy-mC-PO-mC-PO-mA-PO-fU- | 589 | Hy-fU-PO-fG-PO-mC-PO- | 803 |
| | PO-mU-PO-fG-PO-mG-PO-fA- | | fA-PO-mU-PO-fU-PO-mU- | |
| | PO-mC-PO-fA-PO-mA-PO-fU- | | PO-fG-PO-mA-PO-fA-PO- | |
| | PO-mU-PO-fU-PO-mC-PO-fA- | | mA-PO-fU-PO-mU-PO-fG- | |
| | PO-mA-PO-fA-PO-mU-PO-fG- | | PO-mU-PO-fC-PO-mC-PO- | |
| | PO-mC-PO-fA-PO-invdT-Hy | | fA-PO-mA-PO-dT-PO-dT-Hy | |
| 162 | Hy-mC-PO-mC-PO-mA-PO-fU- | 590 | Hy-fG-PO-fA-PO-mA-PO- | 804 |
| | PO-mU-PO-fA-PO-mA-PO-fU- | | fG-PO-mC-PO-fA-PO-mA- | |
| | PO-mA-PO-fU-PO-mA-PO-fU- | | PO-fC-PO-mU-PO-fC-PO- | |
| | PO-mG-PO-fA-PO-mG-PO-fU- | | mA-PO-fU-PO-mA-PO-fU- | |
| | PO-mU-PO-fG-PO-mC-PO-fU- | | PO-mA-PO-fU-PO-mU-PO- | |
| | PO-mU-PO-fC-PO-invdT-Hy | | fA-PO-mA-PO-dT-PO-dT-Hy | |
| 163 | Hy-mC-PO-mC-PO-mA-PO-fG- | 591 | Hy-fG-PO-fA-PO-mA-PO- | 805 |
| | PO-mA-PO-fA-PO-mU-PO-fU- | | fU-PO-mU-PO-fG-PO-mU- | |
| | PO-mG-PO-fA-PO-mU-PO-fC- | | PO-fC-PO-mU-PO-fU-PO- | |
| | PO-mA-PO-fA-PO-mG-PO-fA- | | mG-PO-fA-PO-mU-PO-fC- | |
| | PO-mC-PO-fA-PO-mA-PO-fU- | | PO-mA-PO-fA-PO-mU-PO- | |
| | PO-mU-PO-fC-PO-invdT-Hy | | fU-PO-mC-PO-dT-PO-dT-Hy | |
| 164 | Hy-mC-PO-mC-PO-mA-PO-fA- | 592 | Hy-fU-PO-fG-PO-mA-PO- | 806 |
| | PO-mA-PO-fU-PO-mU-PO-fG- | | fA-PO-mU-PO-fU-PO-mG- | |
| | PO-mA-PO-fU-PO-mC-PO-fA- | | PO-fU-PO-mC-PO-fU-PO- | |
| | PO-mA-PO-fG-PO-mA-PO-fC- | | mU-PO-fG-PO-mA-PO-fU- | |
| | PO-mA-PO-fA-PO-mU-PO-fU- | | PO-mC-PO-fA-PO-mA-PO- | |
| | PO-mC-PO-fA-PO-invdT-Hy | | fU-PO-mU-PO-dT-PO-dT-Hy | |
| 165 | Hy-mC-PO-mC-PO-mA-PO-fA- | 593 | Hy-fA-PO-fU-PO-mG-PO- | 807 |
| | PO-mU-PO-fU-PO-mG-PO-fA- | | fA-PO-mA-PO-fU-PO-mU- | |
| | PO-mU-PO-fC-PO-mA-PO-fA- | | PO-fG-PO-mU-PO-fC-PO- | |
| | PO-mG-PO-fA-PO-mC-PO-fA- | | mU-PO-fU-PO-mG-PO-fA- | |
| | PO-mA-PO-fU-PO-mU-PO-fC- | | PO-mU-PO-fC-PO-mA-PO- | |
| | PO-mA-PO-fU-PO-invdT-Hy | | fA-PO-mU-PO-dT-PO-dT-Hy | |
| 166 | Hy-mC-PO-mC-PO-mA-PO-fU- | 594 | Hy-fG-PO-fA-PO-mU-PO- | 808 |
| | PO-mU-PO-fG-PO-mA-PO-fU- | | fG-PO-mA-PO-fA-PO-mU- | |
| | PO-mC-PO-fA-PO-mA-PO-fG- | | PO-fU-PO-mG-PO-fU-PO- | |
| | PO-mA-PO-fC-PO-mA-PO-fA- | | mC-PO-fU-PO-mU-PO-fG- | |
| | PO-mU-PO-fU-PO-mC-PO-fA- | | PO-mA-PO-fU-PO-mC-PO- | |
| | PO-mU-PO-fC-PO-invdT-Hy | | fA-PO-mA-PO-dT-PO-dT-Hy | |
| 167 | Hy-mC-PO-mC-PO-mA-PO-fU- | 595 | Hy-fU-PO-fG-PO-mA-PO- | 809 |
| | PO-mG-PO-fA-PO-mU-PO-fC- | | fU-PO-mG-PO-fA-PO-mA- | |
| | PO-mA-PO-fA-PO-mG-PO-fA- | | PO-fU-PO-mU-PO-fG-PO- | |
| | PO-mC-PO-fA-PO-mA-PO-fU- | | mU-PO-fC-PO-mU-PO-fU- | |
| | PO-mU-PO-fC-PO-mA-PO-fU- | | PO-mG-PO-fA-PO-mU-PO- | |
| | PO-mC-PO-fA-PO-invdT-Hy | | fC-PO-mA-PO-dT-PO-dT-Hy | |
| 168 | Hy-mC-PO-mC-PO-mA-PO-fG- | 596 | Hy-fA-PO-fU-PO-mG-PO- | 810 |
| | PO-mA-PO-fU-PO-mC-PO-fA- | | fA-PO-mU-PO-fG-PO-mA- | |
| | PO-mA-PO-fG-PO-mA-PO-fC- | | PO-fA-PO-mU-PO-fU-PO- | |
| | PO-mA-PO-fA-PO-mU-PO-fU- | | mG-PO-fU-PO-mC-PO-fU- | |
| | PO-mC-PO-fA-PO-mU-PO-fC- | | PO-mU-PO-fG-PO-mA-PO- | |
| | PO-mA-PO-fU-PO-invdT-Hy | | fU-PO-mC-PO-dT-PO-dT-Hy | |
| 169 | Hy-mC-PO-mC-PO-mA-PO-fA- | 597 | Hy-fA-PO-fA-PO-mU-PO- | 811 |
| | PO-mU-PO-fC-PO-mA-PO-fA- | | fG-PO-mA-PO-fU-PO-mG- | |
| | PO-mG-PO-fA-PO-mC-PO-fA- | | PO-fA-PO-mA-PO-fU-PO- | |
| | PO-mA-PO-fU-PO-mU-PO-fC- | | mU-PO-fG-PO-mU-PO-fC- | |
| | PO-mA-PO-fU-PO-mC-PO-fA- | | PO-mU-PO-fU-PO-mG-PO- | |
| | PO-mU-PO-fU-PO-invdT-Hy | | fA-PO-mU-PO-dT-PO-dT-Hy | |
| 170 | Hy-mC-PO-mC-PO-mA-PO-fU- | 598 | Hy-fA-PO-fA-PO-mA-PO- | 812 |
| | PO-mC-PO-fA-PO-mA-PO-fG- | | fU-PO-mG-PO-fA-PO-mU- | |
| | PO-mA-PO-fC-PO-mA-PO-fA- | | PO-fG-PO-mA-PO-fA-PO- | |
| | PO-mU-PO-fU-PO-mC-PO-fA- | | mU-PO-fU-PO-mG-PO-fU- | |
| | PO-mU-PO-fC-PO-mA-PO-fU- | | PO-mC-PO-fU-PO-mU-PO- | |
| | PO-mU-PO-fU-PO-invdT-Hy | | fG-PO-mA-PO-dT-PO-dT-Hy | |
| 171 | Hy-mC-PO-mC-PO-mA-PO-fU- | 599 | Hy-fA-PO-fU-PO-mA-PO- | 813 |
| | PO-mC-PO-fA-PO-mU-PO-fC- | | fG-PO-mA-PO-fG-PO-mA- | |
| | PO-mA-PO-fU-PO-mU-PO-fU- | | PO-fA-PO-mU-PO-fC-PO- | |
| | PO-mG-PO-fA-PO-mU-PO-fU- | | mA-PO-fA-PO-mA-PO-fU- | |
| | PO-mC-PO-fU-PO-mC-PO-fU- | | PO-mG-PO-fA-PO-mU-PO- | |
| | PO-mA-PO-fU-PO-invdT-Hy | | fG-PO-mA-PO-dT-PO-dT-Hy | |
| 172 | Hy-mC-PO-mC-PO-mA-PO-fC- | 600 | Hy-fG-PO-fA-PO-mU-PO- | 814 |
| | PO-mA-PO-fU-PO-mC-PO-fA- | | fA-PO-mG-PO-fA-PO-mG- | |
| | PO-mU-PO-fU-PO-mU-PO-fG- | | PO-fA-PO-mA-PO-fU-PO- | |
| | PO-mA-PO-fU-PO-mU-PO-fC- | | mC-PO-fA-PO-mA-PO-fA- | |
| | PO-mU-PO-fC-PO-mU-PO-fA- | | PO-mU-PO-fG-PO-mA-PO- | |
| | PO-mU-PO-fC-PO-invdT-Hy | | fU-PO-mG-PO-dT-PO-dT-Hy | |
| 173 | Hy-mC-PO-mC-PO-mA-PO-fA- | 601 | Hy-fA-PO-fG-PO-mA-PO- | 815 |
| | PO-mU-PO-fC-PO-mA-PO-fU- | | fU-PO-mA-PO-fG-PO-mA- | |
| | PO-mU-PO-fU-PO-mG-PO-fA- | | PO-fG-PO-mA-PO-fA-PO- | |
| | PO-mU-PO-fU-PO-mC-PO-fU- | | mU-PO-fC-PO-mA-PO-fA- | |
| | PO-mC-PO-fU-PO-mA-PO-fU- | | PO-mA-PO-fU-PO-mG-PO- | |
| | PO-mC-PO-fU-PO-invdT-Hy | | fA-PO-mU-PO-dT-PO-dT-Hy | |
| 174 | Hy-mC-PO-mC-PO-mA-PO-fU- | 602 | Hy-fC-PO-fU-PO-mU-PO- | 816 |
| | PO-mA-PO-fG-PO-mA-PO-fA- | | fC-PO-mU-PO-fG-PO-mA- | |
| | PO-mA-PO-fA-PO-mU-PO-fC- | | PO-fG-PO-mC-PO-fU-PO- | |
| | PO-mA-PO-fG-PO-mC-PO-fU- | | mG-PO-fA-PO-mU-PO-fU- | |
| | PO-mC-PO-fA-PO-mG-PO-fA- | | PO-mU-PO-fU-PO-mC-PO- | |
| | PO-mA-PO-fG-PO-invdT-Hy | | fU-PO-mA-PO-dT-PO-dT-Hy | |
| 175 | Hy-mC-PO-mC-PO-mA-PO-fG- | 603 | Hy-fU-PO-fC-PO-mC-PO- | 817 |
| | PO-mA-PO-fA-PO-mA-PO-fA- | | fU-PO-mU-PO-fC-PO-mU- | |
| | PO-mU-PO-fC-PO-mA-PO-fG- | | PO-fG-PO-mA-PO-fG-PO- | |
| | PO-mC-PO-fU-PO-mC-PO-fA- | | mC-PO-fU-PO-mG-PO-fA- | |
| | PO-mG-PO-fA-PO-mA-PO-fG- | | PO-mU-PO-fU-PO-mU-PO- | |
| | PO-mG-PO-fA-PO-invdT-Hy | | fU-PO-mC-PO-dT-PO-dT-Hy | |
| 176 | Hy-mC-PO-mC-PO-mA-PO-fA- | 604 | Hy-fG-PO-fU-PO-mC-PO- | 818 |
| | PO-mA-PO-fA-PO-mA-PO-fU- | | fC-PO-mU-PO-fU-PO-mC- | |
| | PO-mC-PO-fA-PO-mG-PO-fC- | | PO-fU-PO-mG-PO-fA-PO- | |
| | PO-mU-PO-fC-PO-mA-PO-fG- | | mG-PO-fC-PO-mU-PO-fG- | |
| | PO-mA-PO-fA-PO-mG-PO-fG- | | PO-mA-PO-fU-PO-mU-PO- | |
| | PO-mA-PO-fC-PO-invdT-Hy | | fU-PO-mU-PO-dT-PO-dT-Hy | |
| 177 | Hy-mC-PO-mC-PO-mA-PO-fA- | 605 | Hy-fA-PO-fG-PO-mU-PO- | 819 |
| | PO-mA-PO-fA-PO-mU-PO-fC- | | fC-PO-mC-PO-fU-PO-mU- | |
| | PO-mA-PO-fG-PO-mC-PO-fU- | | PO-fC-PO-mU-PO-fG-PO- | |
| | PO-mC-PO-fA-PO-mG-PO-fA- | | mA-PO-fG-PO-mC-PO-fU- | |
| | PO-mA-PO-fG-PO-mG-PO-fA- | | PO-mG-PO-fA-PO-mU-PO- | |
| | PO-mC-PO-fU-PO-invdT-Hy | | fU-PO-mU-PO-dT-PO-dT-Hy | |
| 178 | Hy-mC-PO-mC-PO-mA-PO-fA- | 606 | Hy-fU-PO-fA-PO-mG-PO- | 820 |
| | PO-mA-PO-fU-PO-mC-PO-fA- | | fU-PO-mC-PO-fC-PO-mU- | |
| | PO-mG-PO-fC-PO-mU-PO-fC- | | PO-fU-PO-mC-PO-fU-PO- | |
| | PO-mA-PO-fG-PO-mA-PO-fA- | | mG-PO-fA-PO-mG-PO-fC- | |
| | PO-mG-PO-fG-PO-mA-PO-fC- | | PO-mU-PO-fG-PO-mA-PO- | |
| | PO-mU-PO-fA-PO-invdT-Hy | | fU-PO-mU-PO-dT-PO-dT-Hy | |
| 179 | Hy-mC-PO-mC-PO-mA-PO-fG- | 607 | Hy-fA-PO-fU-PO-mU-PO- | 821 |
| | PO-mA-PO-fU-PO-mG-PO-fG- | | fC-PO-mA-PO-fG-PO-mC- | |
| | PO-mC-PO-fA-PO-mU-PO-fU- | | PO-fA-PO-mG-PO-fG-PO- | |
| | PO-mC-PO-fC-PO-mU-PO-fG- | | mA-PO-fA-PO-mU-PO-fG- | |
| | PO-mC-PO-fU-PO-mG-PO-fA- | | PO-mC-PO-fC-PO-mA-PO- | |
| | PO-mA-PO-fU-PO-invdT-Hy | | fU-PO-mC-PO-dT-PO-dT-Hy | |
| 180 | Hy-mC-PO-mC-PO-mA-PO-fC- | 608 | Hy-fG-PO-fG-PO-mU-PO- | 822 |
| | PO-mA-PO-fU-PO-mU-PO-fC- | | fA-PO-mC-PO-fA-PO-mU- | |
| | PO-mC-PO-fU-PO-mG-PO-fC- | | PO-fU-PO-mC-PO-fA-PO- | |
| | PO-mU-PO-fG-PO-mA-PO-fA- | | mG-PO-fC-PO-mA-PO-fG- | |
| | PO-mU-PO-fG-PO-mU-PO-fA- | | PO-mG-PO-fA-PO-mA-PO- | |
| | PO-mC-PO-fC-PO-invdT-Hy | | fU-PO-mG-PO-dT-PO-dT-Hy | |
| 181 | Hy-mC-PO-mC-PO-mA-PO-fU- | 609 | Hy-fG-PO-fG-PO-mU-PO- | 823 |
| | PO-mC-PO-fC-PO-mU-PO-fG- | | fG-PO-mG-PO-fU-PO-mA- | |
| | PO-mC-PO-fU-PO-mG-PO-fA- | | PO-fC-PO-mA-PO-fU-PO- | |
| | PO-mA-PO-fU-PO-mG-PO-fU- | | mU-PO-fC-PO-mA-PO-fG- | |
| | PO-mA-PO-fC-PO-mC-PO-fA- | | PO-mC-PO-fA-PO-mG-PO- | |
| | PO-mC-PO-fC-PO-invdT-Hy | | fG-PO-mA-PO-dT-PO-dT-Hy | |
| 182 | Hy-mC-PO-mC-PO-mA-PO-fC- | 610 | Hy-fA-PO-fU-PO-mG-PO- | 824 |
| | PO-mU-PO-fG-PO-mC-PO-fU- | | fG-PO-mU-PO-fG-PO-mG- | |
| | PO-mG-PO-fA-PO-mA-PO-fU- | | PO-fU-PO-mA-PO-fC-PO- | |
| | PO-mG-PO-fU-PO-mA-PO-fC- | | mA-PO-fU-PO-mU-PO-fC- | |
| | PO-mC-PO-fA-PO-mC-PO-fC- | | PO-mA-PO-fG-PO-mC-PO- | |
| | PO-mA-PO-fU-PO-invdT-Hy | | fA-PO-mG-PO-dT-PO-dT-Hy | |
| 183 | Hy-mC-PO-mC-PO-mA-PO-fU- | 611 | Hy-fA-PO-fA-PO-mU-PO- | 825 |
| | PO-mG-PO-fC-PO-mU-PO-fG- | | fG-PO-mG-PO-fU-PO-mG- | |
| | PO-mA-PO-fA-PO-mU-PO-fG- | | PO-fG-PO-mU-PO-fA-PO- | |
| | PO-mU-PO-fA-PO-mC-PO-fC- | | mC-PO-fA-PO-mU-PO-fU- | |
| | PO-mA-PO-fC-PO-mC-PO-fA- | | PO-mC-PO-fA-PO-mG-PO- | |
| | PO-mU-PO-fU-PO-invdT-Hy | | fC-PO-mA-PO-dT-PO-dT-Hy | |
| 184 | Hy-mC-PO-mC-PO-mA-PO-fG- | 612 | Hy-fA-PO-fA-PO-mA-PO- | 826 |
| | PO-mC-PO-fU-PO-mG-PO-fA- | | fU-PO-mG-PO-fG-PO-mU- | |
| | PO-mA-PO-fU-PO-mG-PO-fU- | | PO-fG-PO-mG-PO-fU-PO- | |
| | PO-mA-PO-fC-PO-mC-PO-fA- | | mA-PO-fC-PO-mA-PO-fU- | |
| | PO-mC-PO-fC-PO-mA-PO-fU- | | PO-mU-PO-fC-PO-mA-PO- | |
| | PO-mU-PO-fU-PO-invdT-Hy | | fG-PO-mC-PO-dT-PO-dT-Hy | |
| 185 | Hy-mC-PO-mC-PO-mA-PO-fC- | 613 | Hy-fU-PO-fA-PO-mA-PO- | 827 |
| | PO-mU-PO-fG-PO-mA-PO-fA- | | fA-PO-mU-PO-fG-PO-mG- | |
| | PO-mU-PO-fG-PO-mU-PO-fA- | | PO-fU-PO-mG-PO-fG-PO- | |
| | PO-mC-PO-fC-PO-mA-PO-fC- | | mU-PO-fA-PO-mC-PO-fA- | |
| | PO-mC-PO-fA-PO-mU-PO-fU- | | PO-mU-PO-fU-PO-mC-PO- | |
| | PO-mU-PO-fA-PO-invdT-Hy | | fA-PO-mG-PO-dT-PO-dT-Hy | |
| 186 | Hy-mC-PO-mC-PO-mA-PO-fA- | 614 | Hy-fC-PO-fA-PO-mC-PO- | 828 |
| | PO-mG-PO-fA-PO-mG-PO-fG- | | fU-PO-mU-PO-fG-PO-mU- | |
| | PO-mU-PO-fG-PO-mA-PO-fA- | | PO-fA-PO-mU-PO-fG-PO- | |
| | PO-mC-PO-fA-PO-mU-PO-fA- | | mU-PO-fU-PO-mC-PO-fA- | |
| | PO-mC-PO-fA-PO-mA-PO-fG- | | PO-mC-PO-fC-PO-mU-PO- | |
| | PO-mU-PO-fG-PO-invdT-Hy | | fC-PO-mU-PO-dT-PO-dT-Hy | |
| 187 | Hy-mC-PO-mC-PO-mA-PO-fG- | 615 | Hy-fC-PO-fC-PO-mA-PO- | 829 |
| | PO-mA-PO-fG-PO-mG-PO-fU- | | fC-PO-mU-PO-fU-PO-mG- | |
| | PO-mG-PO-fA-PO-mA-PO-fC- | | PO-fU-PO-mA-PO-fU-PO- | |
| | PO-mA-PO-fU-PO-mA-PO-fC- | | mG-PO-fU-PO-mU-PO-fC- | |
| | PO-mA-PO-fA-PO-mG-PO-fU- | | PO-mA-PO-fC-PO-mC-PO- | |
| | PO-mG-PO-fG-PO-invdT-Hy | | fU-PO-mC-PO-dT-PO-dT-Hy | |
| 188 | Hy-mC-PO-mC-PO-mA-PO-fA- | 616 | Hy-fG-PO-fC-PO-mC-PO- | 830 |
| | PO-mG-PO-fG-PO-mU-PO-fG- | | fA-PO-mC-PO-fU-PO-mU- | |
| | PO-mA-PO-fA-PO-mC-PO-fA- | | PO-fG-PO-mU-PO-fA-PO- | |
| | PO-mU-PO-fA-PO-mC-PO-fA- | | mU-PO-fG-PO-mU-PO-fU- | |
| | PO-mA-PO-fG-PO-mU-PO-fG- | | PO-mC-PO-fA-PO-mC-PO- | |
| | PO-mG-PO-fC-PO-invdT-Hy | | fC-PO-mU-PO-dT-PO-dT-Hy | |
| 189 | Hy-mC-PO-mC-PO-mA-PO-fG- | 617 | Hy-fU-PO-fG-PO-mC-PO- | 831 |
| | PO-mG-PO-fU-PO-mG-PO-fA- | | fC-PO-mA-PO-fC-PO-mU- | |
| | PO-mA-PO-fC-PO-mA-PO-fU- | | PO-fU-PO-mG-PO-fU-PO- | |
| | PO-mA-PO-fC-PO-mA-PO-fA- | | mA-PO-fU-PO-mG-PO-fU- | |
| | PO-mG-PO-fU-PO-mG-PO-fG- | | PO-mU-PO-fC-PO-mA-PO- | |
| | PO-mC-PO-fA-PO-invdT-Hy | | fC-PO-mC-PO-dT-PO-dT-Hy | |
| 190 | Hy-mC-PO-mC-PO-mA-PO-fA- | 618 | Hy-fG-PO-fA-PO-mU-PO- | 832 |
| | PO-mA-PO-fG-PO-mU-PO-fG- | | fG-PO-mG-PO-fC-PO-mA- | |
| | PO-mG-PO-fC-PO-mA-PO-fU- | | PO-fU-PO-mA-PO-fC-PO- | |
| | PO-mG-PO-fU-PO-mA-PO-fU- | | mA-PO-fU-PO-mG-PO-fC- | |
| | PO-mG-PO-fC-PO-mC-PO-fA- | | PO-mC-PO-fA-PO-mC-PO- | |
| | PO-mU-PO-fC-PO-invdT-Hy | | fU-PO-mU-PO-dT-PO-dT-Hy | |
| 191 | Hy-mC-PO-mC-PO-mA-PO-fA- | 619 | Hy-fU-PO-fG-PO-mA-PO- | 833 |
| | PO-mG-PO-fU-PO-mG-PO-fG- | | fU-PO-mG-PO-fG-PO-mC- | |
| | PO-mC-PO-fA-PO-mU-PO-fG- | | PO-fA-PO-mU-PO-fA-PO- | |
| | PO-mU-PO-fA-PO-mU-PO-fG- | | mC-PO-fA-PO-mU-PO-fG- | |
| | PO-mC-PO-fC-PO-mA-PO-fU- | | PO-mC-PO-fC-PO-mA-PO- | |
| | PO-mC-PO-fA-PO-invdT-Hy | | fC-PO-mU-PO-dT-PO-dT-Hy | |
| 192 | Hy-mC-PO-mC-PO-mA-PO-fG- | 620 | Hy-fC-PO-fU-PO-mG-PO- | 834 |
| | PO-mU-PO-fG-PO-mG-PO-fC- | | fA-PO-mU-PO-fG-PO-mG- | |
| | PO-mA-PO-fU-PO-mG-PO-fU- | | PO-fC-PO-mA-PO-fU-PO- | |
| | PO-mA-PO-fU-PO-mG-PO-fC- | | mA-PO-fC-PO-mA-PO-fU- | |
| | PO-mC-PO-fA-PO-mU-PO-fC- | | PO-mG-PO-fC-PO-mC-PO- | |
| | PO-mA-PO-fG-PO-invdT-Hy | | fA-PO-mC-PO-dT-PO-dT-Hy | |
| 193 | Hy-mC-PO-mC-PO-mA-PO-fU- | 621 | Hy-fU-PO-fC-PO-mU-PO- | 835 |
| | PO-mG-PO-fG-PO-mC-PO-fA- | | fG-PO-mA-PO-fU-PO-mG- | |
| | PO-mU-PO-fG-PO-mU-PO-fA- | | PO-fG-PO-mC-PO-fA-PO- | |
| | PO-mU-PO-fG-PO-mC-PO-fC- | | mU-PO-fA-PO-mC-PO-fA- | |
| | PO-mA-PO-fU-PO-mC-PO-fA- | | PO-mU-PO-fG-PO-mC-PO- | |
| | PO-mG-PO-fA-PO-invdT-Hy | | fC-PO-mA-PO-dT-PO-dT-Hy | |
| 194 | Hy-mC-PO-mC-PO-mA-PO-fC- | 622 | Hy-fA-PO-fA-PO-mC-PO- | 836 |
| | PO-mU-PO-fA-PO-mU-PO-fA- | | fU-PO-mA-PO-fG-PO-mA- | |
| | PO-mC-PO-fG-PO-mC-PO-fU- | | PO-fU-PO-mG-PO-fU-PO- | |
| | PO-mA-PO-fC-PO-mA-PO-fU- | | mA-PO-fG-PO-mC-PO-fG- | |
| | PO-mC-PO-fU-PO-mA-PO-fG- | | PO-mU-PO-fA-PO-mU-PO- | |
| | PO-mU-PO-fU-PO-invdT-Hy | | fA-PO-mG-PO-dT-PO-dT-Hy | |
| 195 | Hy-mC-PO-mC-PO-mA-PO-fC- | 623 | Hy-fC-PO-fA-PO-mG-PO- | 837 |
| | PO-mA-PO-fA-PO-mA-PO-fA- | | fU-PO-mU-PO-fG-PO-mA- | |
| | PO-mG-PO-fG-PO-mA-PO-fC- | | PO-fA-PO-mG-PO-fU-PO- | |
| | PO-mA-PO-fC-PO-mU-PO-fU- | | mG-PO-fU-PO-mC-PO-fC- | |
| | PO-mC-PO-fA-PO-mA-PO-fC- | | PO-mU-PO-fU-PO-mU-PO- | |
| | PO-mU-PO-fG-PO-invdT-Hy | | fU-PO-mG-PO-dT-PO-dT-Hy | |
| 196 | Hy-mC-PO-mC-PO-mA-PO-fA- | 624 | Hy-fA-PO-fC-PO-mA-PO- | 838 |
| | PO-mA-PO-fA-PO-mA-PO-fG- | | fG-PO-mU-PO-fU-PO-mG- | |
| | PO-mG-PO-fA-PO-mC-PO-fA- | | PO-fA-PO-mA-PO-fG-PO- | |
| | PO-mC-PO-fU-PO-mU-PO-fC- | | mU-PO-fG-PO-mU-PO-fC- | |
| | PO-mA-PO-fA-PO-mC-PO-fU- | | PO-mC-PO-fU-PO-mU-PO- | |
| | PO-mG-PO-fU-PO-invdT-Hy | | fU-PO-mU-PO-dT-PO-dT-Hy | |
| 197 | Hy-mC-PO-mC-PO-mA-PO-fA- | 625 | Hy-fG-PO-fA-PO-mC-PO- | 839 |
| | PO-mA-PO-fA-PO-mG-PO-fG- | | fA-PO-mG-PO-fU-PO-mU- | |
| | PO-mA-PO-fC-PO-mA-PO-fC- | | PO-fG-PO-mA-PO-fA-PO- | |
| | PO-mU-PO-fU-PO-mC-PO-fA- | | mG-PO-fU-PO-mG-PO-fU- | |
| | PO-mA-PO-fC-PO-mU-PO-fG- | | PO-mC-PO-fC-PO-mU-PO- | |
| | PO-mU-PO-fC-PO-invdT-Hy | | fU-PO-mU-PO-dT-PO-dT-Hy | |
| 198 | Hy-mC-PO-mC-PO-mA-PO-fA- | 626 | Hy-fG-PO-fG-PO-mA-PO- | 840 |
| | PO-mA-PO-fG-PO-mG-PO-fA- | | fC-PO-mA-PO-fG-PO-mU- | |
| | PO-mC-PO-fA-PO-mC-PO-fU- | | PO-fU-PO-mG-PO-fA-PO- | |
| | PO-mU-PO-fC-PO-mA-PO-fA- | | mA-PO-fG-PO-mU-PO-fG- | |
| | PO-mC-PO-fU-PO-mG-PO-fU- | | PO-mU-PO-fC-PO-mC-PO- | |
| | PO-mC-PO-fC-PO-invdT-Hy | | fU-PO-mU-PO-dT-PO-dT-Hy | |
| 199 | Hy-mC-PO-mC-PO-mA-PO-fA- | 627 | Hy-fU-PO-fG-PO-mG-PO- | 841 |
| | PO-mG-PO-fG-PO-mA-PO-fC- | | fA-PO-mC-PO-fA-PO-mG- | |
| | PO-mA-PO-fC-PO-mU-PO-fU- | | PO-fU-PO-mU-PO-fG-PO- | |
| | PO-mC-PO-fA-PO-mA-PO-fC- | | mA-PO-fA-PO-mG-PO-fU- | |
| | PO-mU-PO-fG-PO-mU-PO-fC- | | PO-mG-PO-fU-PO-mC-PO- | |
| | PO-mC-PO-fA-PO-invdT-Hy | | fC-PO-mU-PO-dT-PO-dT-Hy | |
| 200 | Hy-mC-PO-mC-PO-mA-PO-fG- | 628 | Hy-fC-PO-fU-PO-mG-PO- | 842 |
| | PO-mG-PO-fA-PO-mC-PO-fA- | | fG-PO-mA-PO-fC-PO-mA- | |
| | PO-mC-PO-fU-PO-mU-PO-fC- | | PO-fG-PO-mU-PO-fU-PO- | |
| | PO-mA-PO-fA-PO-mC-PO-fU- | | mG-PO-fA-PO-mA-PO-fG- | |
| | PO-mG-PO-fU-PO-mC-PO-fC- | | PO-mU-PO-fG-PO-mU-PO- | |
| | PO-mA-PO-fG-PO-invdT-Hy | | fC-PO-mC-PO-dT-PO-dT-Hy | |
| 201 | Hy-mC-PO-mC-PO-mA-PO-fG- | 629 | Hy-fC-PO-fC-PO-mU-PO- | 843 |
| | PO-mU-PO-fC-PO-mC-PO-fA- | | fG-PO-mA-PO-fA-PO-mU- | |
| | PO-mG-PO-fA-PO-mG-PO-fG- | | PO-fA-PO-mA-PO-fC-PO- | |
| | PO-mG-PO-fU-PO-mU-PO-fA- | | mC-PO-fC-PO-mU-PO-fC- | |
| | PO-mU-PO-fU-PO-mC-PO-fA- | | PO-mU-PO-fG-PO-mG-PO- | |
| | PO-mG-PO-fG-PO-invdT-Hy | | fA-PO-mC-PO-dT-PO-dT-Hy | |
| 202 | Hy-mC-PO-mC-PO-mA-PO-fU- | 630 | Hy-fU-PO-fC-PO-mC-PO- | 844 |
| | PO-mC-PO-fC-PO-mA-PO-fG- | | fU-PO-mG-PO-fA-PO-mA- | |
| | PO-mA-PO-fG-PO-mG-PO-fG- | | PO-fU-PO-mA-PO-fA-PO- | |
| | PO-mU-PO-fU-PO-mA-PO-fU- | | mC-PO-fC-PO-mC-PO-fU- | |
| | PO-mU-PO-fC-PO-mA-PO-fG- | | PO-mC-PO-fU-PO-mG-PO- | |
| | PO-mG-PO-fA-PO-invdT-Hy | | fG-PO-mA-PO-dT-PO-dT-Hy | |
| 203 | Hy-mC-PO-mC-PO-mA-PO-fC- | 631 | Hy-fC-PO-fU-PO-mC-PO- | 845 |
| | PO-mC-PO-fA-PO-mG-PO-fA- | | fC-PO-mU-PO-fG-PO-mA- | |
| | PO-mG-PO-fG-PO-mG-PO-fU- | | PO-fA-PO-mU-PO-fA-PO- | |
| | PO-mU-PO-fA-PO-mU-PO-fU- | | mA-PO-fC-PO-mC-PO-fC- | |
| | PO-mC-PO-fA-PO-mG-PO-fG- | | PO-mU-PO-fC-PO-mU-PO- | |
| | PO-mA-PO-fG-PO-invdT-Hy | | fG-PO-mG-PO-dT-PO-dT-Hy | |
| 204 | Hy-mC-PO-mC-PO-mA-PO-fC- | 632 | Hy-fC-PO-fC-PO-mU-PO- | 846 |
| | PO-mA-PO-fG-PO-mA-PO-fG- | | fC-PO-mC-PO-fU-PO-mG- | |
| | PO-mG-PO-fG-PO-mU-PO-fU- | | PO-fA-PO-mA-PO-fU-PO- | |
| | PO-mA-PO-fU-PO-mU-PO-fC- | | mA-PO-fA-PO-mC-PO-fC- | |
| | PO-mA-PO-fG-PO-mG-PO-fA- | | PO-mC-PO-fU-PO-mC-PO- | |
| | PO-mG-PO-fG-PO-invdT-Hy | | fU-PO-mG-PO-dT-PO-dT-Hy | |
| 205 | Hy-mC-PO-mC-PO-mA-PO-fA- | 633 | Hy-fG-PO-fC-PO-mC-PO- | 847 |
| | PO-mG-PO-fA-PO-mG-PO-fG- | | fU-PO-mC-PO-fC-PO-mU- | |
| | PO-mG-PO-fU-PO-mU-PO-fA- | | PO-fG-PO-mA-PO-fA-PO- | |
| | PO-mU-PO-fU-PO-mC-PO-fA- | | mU-PO-fA-PO-mA-PO-fC- | |
| | PO-mG-PO-fG-PO-mA-PO-fG- | | PO-mC-PO-fC-PO-mU-PO- | |
| | PO-mG-PO-fC-PO-invdT-Hy | | fC-PO-mU-PO-dT-PO-dT-Hy | |
| 206 | Hy-mC-PO-mC-PO-mA-PO-fG- | 634 | Hy-fA-PO-fG-PO-mC-PO- | 848 |
| | PO-mA-PO-fG-PO-mG-PO-fG- | | fC-PO-mU-PO-fC-PO-mC- | |
| | PO-mU-PO-fU-PO-mA-PO-fU- | | PO-fU-PO-mG-PO-fA-PO- | |
| | PO-mU-PO-fC-PO-mA-PO-fG- | | mA-PO-fU-PO-mA-PO-fA- | |
| | PO-mG-PO-fA-PO-mG-PO-fG- | | PO-mC-PO-fC-PO-mC-PO- | |
| | PO-mC-PO-fU-PO-invdT-Hy | | fU-PO-mC-PO-dT-PO-dT-Hy | |
| 207 | Hy-mC-PO-mC-PO-mA-PO-fA- | 635 | Hy-fC-PO-fA-PO-mG-PO- | 849 |
| | PO-mG-PO-fG-PO-mG-PO-fU- | | fC-PO-mC-PO-fU-PO-mC- | |
| | PO-mU-PO-fA-PO-mU-PO-fU- | | PO-fC-PO-mU-PO-fG-PO- | |
| | PO-mC-PO-fA-PO-mG-PO-fG- | | mA-PO-fA-PO-mU-PO-fA- | |
| | PO-mA-PO-fG-PO-mG-PO-fC- | | PO-mA-PO-fC-PO-mC-PO- | |
| | PO-mU-PO-fG-PO-invdT-Hy | | fC-PO-mU-PO-dT-PO-dT-Hy | |
| 208 | Hy-mC-PO-mC-PO-mA-PO-fG- | 636 | Hy-fA-PO-fC-PO-mC-PO- | 850 |
| | PO-mG-PO-fU-PO-mU-PO-fA- | | fA-PO-mG-PO-fC-PO-mC- | |
| | PO-mU-PO-fU-PO-mC-PO-fA- | | PO-fU-PO-mC-PO-fC-PO- | |
| | PO-mG-PO-fG-PO-mA-PO-fG- | | mU-PO-fG-PO-mA-PO-fA- | |
| | PO-mG-PO-fC-PO-mU-PO-fG- | | PO-mU-PO-fA-PO-mA-PO- | |
| | PO-mG-PO-fU-PO-invdT-Hy | | fC-PO-mC-PO-dT-PO-dT-Hy | |
| 209 | Hy-mC-PO-mC-PO-mA-PO-fA- | 637 | Hy-fC-PO-fU-PO-mU-PO- | 851 |
| | PO-mA-PO-fG-PO-mA-PO-fG- | | fC-PO-mC-PO-fA-PO-mA- | |
| | PO-mG-PO-fA-PO-mU-PO-fU- | | PO-fG-PO-mA-PO-fU-PO- | |
| | PO-mA-PO-fU-PO-mC-PO-fU- | | mA-PO-fA-PO-mU-PO-fC- | |
| | PO-mU-PO-fG-PO-mG-PO-fA- | | PO-mC-PO-fU-PO-mC-PO- | |
| | PO-mA-PO-fG-PO-invdT-Hy | | fU-PO-mU-PO-dT-PO-dT-Hy | |
| 210 | Hy-mC-PO-mC-PO-mA-PO-fA- | 638 | Hy-fA-PO-fC-PO-mU-PO- | 852 |
| | PO-mG-PO-fA-PO-mG-PO-fG- | | fU-PO-mC-PO-fC-PO-mA- | |
| | PO-mA-PO-fU-PO-mU-PO-fA- | | PO-fA-PO-mG-PO-fA-PO- | |
| | PO-mU-PO-fC-PO-mU-PO-fU- | | mU-PO-fA-PO-mA-PO-fU- | |
| | PO-mG-PO-fG-PO-mA-PO-fA- | | PO-mC-PO-fC-PO-mU-PO- | |
| | PO-mG-PO-fU-PO-invdT-Hy | | fC-PO-mU-PO-dT-PO-dT-Hy | |
| 211 | Hy-mC-PO-mC-PO-mA-PO-fG- | 639 | Hy-fG-PO-fA-PO-mC-PO- | 853 |
| | PO-mA-PO-fG-PO-mG-PO-fA- | | fU-PO-mU-PO-fC-PO-mC- | |
| | PO-mU-PO-fU-PO-mA-PO-fU- | | PO-fA-PO-mA-PO-fG-PO- | |
| | PO-mC-PO-fU-PO-mU-PO-fG- | | mA-PO-fU-PO-mA-PO-fA- | |
| | PO-mG-PO-fA-PO-mA-PO-fG- | | PO-mU-PO-fC-PO-mC-PO- | |
| | PO-mU-PO-fC-PO-invdT-Hy | | fU-PO-mC-PO-dT-PO-dT-Hy | |
| 212 | Hy-mC-PO-mC-PO-mA-PO-fA- | 640 | Hy-mG-PO-fA-PO-mA-PO- | 854 |
| | PO-mG-PO-fA-PO-mC-PO-fA- | | fU-PO-mC-PO-fA-PO-mA- | |
| | PO-mA-PO-fU-PO-mU-PO-fC- | | PO-fA-PO-mU-PO-fG-PO- | |
| | PO-mA-PO-fU-PO-mC-PO-fA- | | mA-PO-fU-PO-mG-PO-fA- | |
| | PO-mU-PO-fU-PO-mU-PO-fG- | | PO-mA-PO-fU-PO-mU-PO- | |
| | PO-mA-PO-fU-PO-mU-PO-fC- | | fG-PO-mU-PO-fC-PO-mU- | |
| | PO-invdT-Hy | | PO-dT-PO-dT-Hy | |
| 213 | Hy-mC-PO-mC-PO-mA-PO-fA- | 641 | Hy-fA-PO-mA-PO-fU-PO- | 855 |
| | PO-mG-PO-fA-PO-mC-PO-fA- | | mC-PO-fA-PO-mA-PO-fA- | |
| | PO-mA-PO-fU-PO-mU-PO-fC- | | PO-mU-PO-fG-PO-mA-PO- | |
| | PO-mA-PO-fU-PO-mC-PO-fA- | | fU-PO-mG-PO-fA-PO-mA- | |
| | PO-mU-PO-fU-PO-mU-PO-fG- | | PO-fU-PO-mU-PO-fG-PO- | |
| | PO-mA-PO-fU-PO-mU-PO- | | mU-PO-fC-PO-mU-PO-dT- | |
| | invdT-Hy | | PO-dT-Hy | |
| 214 | Hy-mC-PO-mC-PO-mA-PO-fG- | 642 | Hy-fG-PO-mA-PO-fA-PO- | 856 |
| | PO-mA-PO-fC-PO-mA-PO-fA- | | mU-PO-fC-PO-mA-PO-fA- | |
| | PO-mU-PO-fU-PO-mC-PO-fA- | | PO-mA-PO-fU-PO-mG-PO- | |
| | PO-mU-PO-fC-PO-mA-PO-fU- | | fA-PO-mU-PO-fG-PO-mA- | |
| | PO-mU-PO-fU-PO-mG-PO-fA- | | PO-fA-PO-mU-PO-fU-PO- | |
| | PO-mU-PO-fU-PO-mC-PO- | | mG-PO-fU-PO-mC-PO-dT- | |
| | invdT-Hy | | PO-dT-Hy | |

[0159] In some embodiments, the dsRNA comprises one or more modified nucleotides described in PCT Publication WO 2019/170731, the disclosure of which is incorporated herein in its entirety. In such modified nucleotides, the ribose ring has been replaced by a six-membered heterocyclic ring. Such a modified nucleotide has the structure of formula (I):

[chemical structure]

[0160] wherein:
   [0161] B is a heterocyclic nucleobase;
   [0162] one of L1 and L2 is an internucleoside linking group linking the compound of formula (I) to a polynucleotide and the other of L1 and L2 is H, a protecting group, a phosphorus moiety or an internucleoside linking group linking the compound of formula (I) to a polynucleotide,
   [0163] Y is O, NH, NR1 or N—C(═O)—R1, wherein R1 is:
[0164] a (C1-C20) alkyl group, optionally substituted by one or more groups selected from an halogen atom, a (C1-C6) alkyl group, a (C3-C8) cycloalkyl group, a (C3-C14) heterocycle, a (C6-C14) aryl group, a (C5-C14) heteroaryl group, —O-Z1, —N(Z1)(Z2), —S-Z1, —CN, —C(=J)-O-Z1, —O—C(=J)-Z1, —C(=J)-N(Z1)(Z2), and —N(Z1)-C(=J)-Z2, wherein
[0165] J is O or S,
[0166] each of Z1 and Z2 is, independently, H, a (C1-C6) alkyl group, optionally substituted by one or more groups selected from a halogen atom and a (C1-C6) alkyl group,
[0167] a (C3-C8) cycloalkyl group, optionally substituted by one or more groups selected from a halogen atom and a (C1-C6) alkyl group,
[0168] a group —[C(═O)]m-R2-(O—CH₂—CH₂)p-R3, wherein
[0169] m is an integer meaning 0 or 1,
[0170] p is an integer ranging from 0 to 10, R2 is a (C1-C20) alkylene group optionally substituted by a (C1-C6) alkyl group, —O-Z3, —N(Z3)(Z4), —S-Z3, —CN, —C(═K)—O—Z3, —O—C(═K)—Z3, —C(═K)—N(Z3)(Z4), or —N(Z3)-C(═K)—Z4,
[0171] wherein
[0172] K is O or S,
[0173] each of Z3 and Z4 is, independently, H, a (C1-C6) alkyl group, optionally substituted by one or more groups selected from a halogen atom and a (C1-C6) alkyl group, and
[0174] R3 is selected from the group consisting of a hydrogen atom, a (C1-C6) alkyl group, a (C1-C6) alkoxy group, a (C3-C8) cycloalkyl group, a (C3-C14) heterocycle, a (C6-C14) aryl group or a (C5-C14) heteroaryl group, or R3 is a cell targeting moiety,
   [0175] X1 and X2 are each, independently, a hydrogen atom, a (C1-C6) alkyl group, and
   [0176] each of Ra, Rb, Rc and Rd is, independently, H or a (C1-C6) alkyl group,
[0177] or is a pharmaceutically acceptable salt thereof.

[0178] In some embodiments, Y is NR1, R1 is a non-substituted (C1-C20) alkyl group, and L1, L2, Ra, Rb, Rc, Rd, X1, X2, R2, R3 and B have the same meaning as defined for the general formula (I), or a pharmaceutically acceptable salt thereof.

[0179] In some embodiments, Y is NR1, R1 is a non-substituted (C1-C16) alkyl group, which includes an alkyl group selected from a group comprising methyl, isopropyl, butyl, octyl, hexadecyl, and L1, L2, Ra, Rb, Rc, Rd, X1, X2, R2, R3 and B have the same meaning as defined for the general formula (I), or a pharmaceutically acceptable salt thereof.

[0180] In some embodiments, Y is NR1, R1 is a (C3-C8) cycloalkyl group, optionally substituted by one or more groups selected from a halogen atom and a (C1-C6) alkyl group, and L1, L2, Ra, Rb, Rc, Rd, X1, X2, R2, R3 and B have the same meaning as defined for the general formula (I), or a pharmaceutically acceptable salt thereof.

[0181] In some embodiments, Y is NR1, R1 is a cyclohexyl group, and L1, L2, Ra, Rb, Rc, Rd, X1, X2, R2, R3 and B have the same meaning as defined for the general formula (I), or a pharmaceutically acceptable salt thereof.

[0182] In some embodiments, Y is NR1, R1 is a (C1-C20) alkyl group substituted by a (C6-C14) aryl group and L1, L2, Ra, Rb, Rc, Rd, X1, X2, R2, R3 and B have the same meaning as defined for the general formula (I), or a pharmaceutically acceptable salt thereof.

[0183] In some embodiments, Y is NR1, R1 is a methyl group substituted by a phenyl group, and L1, L2, Ra, Rb, Rc, Rd, X1, X2, R2, R3 and B have the same meaning as defined for the general formula (I), or a pharmaceutically acceptable salt thereof.

[0184] In some embodiments, Y is N—C(═O)—R1, R1 is an optionally substituted (C1-C20) alkyl group, and L1, L2, Ra, Rb, Rc, Rd, X1, X2, R2, R3 and B have the same meaning as defined for the general formula (I), or a pharmaceutically acceptable salt thereof.

[0185] In some embodiments, Y is N—C(═O)—R1, R1 is selected from a group comprising methyl and pentadecyl and L1, L2, Ra, Rb, Rc, Rd, X1, X2, R2, R3 and B have the same meaning as defined for the general formula (I), or a pharmaceutically acceptable salt thereof.

[0186] In some embodiments, B is selected from a group comprising a pyrimidine, a substituted pyrimidine, a purine and a substituted purine, or a pharmaceutically acceptable salt thereof.

[0187] In some embodiments, the internucleoside linking group in the dsRNA is independently selected from the group consisting of phosphodiester, phosphotriester, phosphorothioate, phosphorodithioate, alkyl-phosphonate and phosphoramidate backbone linking groups, or a pharmaceutically acceptable salt thereof.

[0188] In some embodiments, the dsRNA comprises from 2 to 10 compounds of formula (I), or a pharmaceutically acceptable salt thereof.

[0189] In further embodiments, the dsRNA comprises one or more targeted nucleotides or a pharmaceutically acceptable salt thereof.

[0190] In some embodiments, R3 is of the formula (II):

[chemical structure]

[0191] wherein A1, A2 and A3 are OH,
[0192] A4 is OH or NHC(═O)—R5, wherein R5 is a (C1-C6) alkyl group, optionally substituted by a halogen atom.

[0193] In some embodiments, R3 is N-acetyl-galactosamine.

[0194] The precursors that can be used to make modified siRNAs having nucleotides of formula (I) are exemplified in Table A, which shows examples of phosphoramidite nucleotide analogs for oligonucleotide synthesis. In the (2S,6R) diastereomeric series, the phosphoramidites as nucleotide precursors are abbreviated with a “pre-1”, the nucleotide analogs are abbreviated with an “1”, followed by the nucleobase and a number, which specifies the group Y in formula (I). To distinguish both stereochemistries, the analogues (2R,6R)-diastereoisomers are indicated with an additional “b.” Targeted nucleotide precursors, targeted nucleotide analogs and solid supports are abbreviated as described above, but with an “lg” instead of the “l.”

TABLE A

| | | | Name in | |
|---|---|---|---|---|
| | | Precursor | oligo- | |
| N^{o} | Structure | name | sequence | Stereochemistry |
| 1 | [chemical structure] | pre-lT3 | lT3 | (2S,6R) |
| 2 | [chemical structure] | pre-lU3 | lU3 | (2S,6R) |
| 3 | [chemical structure] | pre-lG3 | lG3 | (2S,6R) |
| 4 | [chemical structure] | pre-lA3 | lA3 | (2S,6R) |
| 5 | [chemical structure] | pre-lC3 | lC3 | (2S,6R) |
| 6 | [chemical structure] | pre-lT3b | lT3b | (2R,6R) |
| 7 | [chemical structure] | pre-lU3b | lU3b | (2R,6R) |
| 8 | [chemical structure] | pre-lG3b | lG3b | (2R,6R) |
| 9 | [chemical structure] | pre-lA3b | lA3b | (2R,6R) |
| 10 | [chemical structure] | pre-lC3b | lC3b | (2R,6R) |
| 11 | [chemical structure] | pre-lT2 | lT2 | (2S,6R) |
| 12 | [chemical structure] | pre-lT6 | lT6 | (2S,6R) |
| 13 | [chemical structure] | pre-lT7 | lT7 | (2S,6R) |
| 14 | [chemical structure] | pre-lT8 | lT8 | (2S,6R) |
| 15 | [chemical structure] | pre-lT4 | lT4 | (2S,6R) |
| 16 | [chemical structure] | pre-lT5 | lT5 | (2S,6R) |
| 17 | [chemical structure] | pre-lT9 | lT9 | (2S,6R) |
| 18 | [chemical structure] | pre-lT10 | lT10 | (2S,6R) |
| 19 | [chemical structure] | pre-lT1 | lT1 | (2S,6R) |
| 20 | [chemical structure] | pre-lU1 | lU1 | (2S,6R) |
| 21 | [chemical structure] | pre-lG1 | lG1 | (2S,6R) |
| 22 | [chemical structure] | pre-lC1 | lC1 | (2S,6R) |
| 23 | [chemical structure] | pre-lT1b | lT1b | (2R,6R) |
| 24 | [chemical structure] | pre-lU1b | lU1b | (2R,6R) |
| 25 | [chemical structure] | pre-lC1b | lC1b | (2R,6R) |
| 26 | [chemical structure] | pre-lgT9 | lgT9 | (2S,6R) |
| 27 | [chemical structure] | pre-lgT8 | lgT8 | (2S,6R) |
| 28 | [chemical structure] | pre-lgT7 | lgT7 | (2S,6R) |
| 29 | [chemical structure] | pre-lgT6 | lgT6 | (2S,6R) |
| 30 | [chemical structure] | pre-lgT5 | lgT5 | (2S,6R) |
| 31 | [chemical structure] | pre-lgT3 | lgT3 | (2S,6R) |
| 32 | [chemical structure] | pre-lgT4 | lgT4 | (2S,6R) |
| 33 | [chemical structure] | pre-lgT12 | lgT12 | (2S,6R) |
| 34 | [chemical structure] | pre-lgT11 | lgT11 | (2S,6R) |
| 35 | [chemical structure] | pre-lgT10 | lgT10 | (2S,6R) |
| 36 | [chemical structure] | pre-lgT1 | lgT1 | (2S,6R) |
| 37 | [chemical structure] | pre-lgT2 | lgT2 | (2S,6R) |
| 38 | [chemical structure] | pre-lU4 | lU4 | (2S,6R) |
| 39 | [chemical structure] | pre-lG4 | lG4 | (2S,6R) |
| 40 | [chemical structure] | pre-lA4 | lA4 | (2S,6R) |
| 41 | [chemical structure] | pre-lC4 | lC4 | (2S,6R) |
| 42 | [chemical structure] | pre-lA4b | lA4b | (2R,6R) |
| 43 | [chemical structure] | pre-lA1 | lA1 | (2S,6R) |
| 44 | [chemical structure] | pre-lA1b | lA1b | (2R,6R) |
| 45 | [chemical structure] | pre-lT4b | lT4b | (2R,6R) |
| 46 | [chemical structure] | pre-lG1b | lG1b | (2R,6R) |

[0195] The modified nucleotides of formula (I) may be incorporated at the 5′, 3′, or both ends of the sense strand and/or antisense strand of the dsRNA. By way of example, one or more (e.g., 1, 2, 3, 4, or 5 or more) modified nucleotides may be incorporated at the 5′ end of the sense strand of the dsRNA. In some embodiments, one or more (e.g., 1, 2, 3, or more) modified nucleotides are positioned in the 5′ end of the sense strand, where the modified nucleotides do not complement the antisense sequence but may be optionally paired with an equal or smaller number of complementary nucleotides at the corresponding 3′ end of the antisense strand.

[0196] In some embodiments, the dsRNA may comprise a sense strand having a sense sequence of 17, 18, or 19 nucleotides in length, where three to five nucleotides of formula (I) (e.g., three consecutive lgT3 or lgT7 with or without additional nucleotides of formula (I)) are placed in the 5′ end of the sense sequence, making the sense strand 20, 21, or 22 nucleotides in length. In such embodiments, the sense strand may additionally comprise two consecutive nucleotides of formula (I) (e.g., 1T4 or lT3) at the 3′ of the sense sequence, making the sense strand 22, 23, or 24 nucleotides in length. The dsRNA may comprise an antisense sequence of 19 nucleotides in length, where the antisense sequence may additionally be linked to 2 modified nucleotides or deoxyribonucleotides (e.g., dT) at its 3′ end, making the antisense strand 21 nucleotides in length. In further embodiments, the sense strand of the dsRNA contains only naturally occurring internucleotide bonds (phosphodiester bond), where the antisense strand may optionally contain non-naturally occurring internucleotide bonds. For example, the antisense strand may contain phosphoro-thioate bonds in the backbone near or at its 5′ and/or 3′ ends.

[0197] In some embodiments, the use of modified nucleotides of formula (I) circumvents the need for other RNA modifications such as the use of non-naturally occurring internucleotide bonds, thereby simplifying the chemical synthesis of dsRNAs. Moreover, the modified nucleotides of formula (I) can be readily made to contain cell targeted moieties such as GalNAc derivatives (which include GalNAc itself), enhancing the delivery efficiency of dsRNAs incorporating such nucleotides. Further, it has been shown that dsRNAs incorporating modified nucleotides of formula (I), e.g., at the sense strand, significantly improve the stability and therapeutic potency of the dsRNAs.

[0198] Table 3 below lists the sequences of exemplary modified GalNAc-siRNA constructs derived from constructs siRNA #013, siRNA #051, and siRNA #165 listed in Table 2. In the table, mX=2′-O-Me nucleotide; fX=2′-F nucleotide; dX=DNA nucleotide; lx=locked nucleic acid (LNA); PO=phosphodiester linkage; PS=phosphorothioate linkage; and Hy=hydroxyl group.

TABLE 3
Sequences of Exemplary Modified GalNAc-siRNA Constructs from siRNA#013,
siRNA#051, and siRNA#165

| SIRNA | Sense strand sequence | | Antisense strand sequence | |
|---|---|---|---|---|
| # | (5′-3′) | SEQ | (5′-3′) | SEQ |
| 013-c-01 | Hy-lgT7-PO-lgT7-PO-lgT7- | 857 | Hy-mA-PS-fU-PS-mC-PO- | 1019 |
| | PO-mA-PO-mG-PO-mA-PO-mC- | | fA-PO-mA-PO-mA-PO-mU- | |
| | PO-lA-PO-mA-PO-fU-PO-fU- | | PO-mG-PO-mA-PO-mU-PO- | |
| | PO-fC-PO-mA-PO-mU-PO-mC- | | mG-PO-mA-PO-mA-PO-fU- | |
| | PO-mA-PO-mU-PO-mU-PO-mU- | | PO-mU-PO-fG-PO-mU-PO- | |
| | PO-mG-PS-mA-PS-mU-Hy | | mC-PO-mU-PS-mA-PS-mA- | |
| | | | Hy | |
| 013-c-02 | Hy-lgT7-PO-lgT7-PO-lgT7- | 858 | Hy-mA-PS-fU-PS-mC-PO- | 1020 |
| | PO-mA-PO-mG-PO-mA-PO-mC- | | mA-PO-mA-PO-fA-PO-mU- | |
| | PO-fA-PO-mA-PO-fU-PO-fU- | | PO-mG-PO-mA-PO-mU-PO- | |
| | PO-fC-PO-mA-PO-mU-PO-mC- | | mG-PO-mA-PO-mA-PO-fU- | |
| | PO-mA-PO-mU-PO-mU-PO-mU- | | PO-mU-PO-fG-PO-mU-PO- | |
| | PO-mG-PS-mA-PS-mU-Hy | | mC-PO-mU-PS-mA-PS-mA- | |
| | | | Hy | |
| 013-c-03 | Hy-lgT7-PO-lgT7-PO-lgT7- | 859 | Hy-mA-PS-fU-PS-mC-PO- | 1021 |
| | PO-mA-PO-mG-PO-mA-PO-mC- | | fA-PO-mA-PO-mA-PO-mU- | |
| | PO-fA-PO-mA-PO-fU-PO-fU- | | PO-mG-PO-fA-PO-mU-PO- | |
| | PO-fC-PO-mA-PO-mU-PO-mC- | | mG-PO-mA-PO-mA-PO-fU- | |
| | PO-mA-PO-mU-PO-mU-PO-mU- | | PO-mU-PO-fG-PO-mU-PO- | |
| | PO-mG-PS-mA-PS-mU-Hy | | mC-PO-mU-PS-mA-PS-mA- | |
| | | | Hy | |
| 013-c-04 | Hy-lgT7-PO-lgT7-PO-lgT7- | 860 | Hy-fA-PS-fU-PS-mC-PO- | 1022 |
| | PO-mA-PO-mG-PO-mA-PO-mC- | | fA-PO-mA-PO-fA-PO-mU- | |
| | PO-fA-PO-mA-PO-fU-PO-fU- | | PO-fG-PO-mA-PO-fU-PO- | |
| | PO-fC-PO-mA-PO-mU-PO-mC- | | mG-PO-mA-PO-mA-PO-fU- | |
| | PO-mA-PO-mU-PO-mU-PO-mU- | | PO-mU-PO-fG-PO-mU-PO- | |
| | PO-mG-PS-mA-PS-mU-Hy | | fC-PO-mU-PS-dT-PS-dT- | |
| | | | Hy | |
| 013-c-05 | Hy-lgT7-PO-lgT7-PO-lgT7- | 861 | Hy-mA-PS-fU-PS-mC-PO- | 1023 |
| | PO-lA-PO-lG-PO-mA-PO-mC- | | fA-PO-mA-PO-mA-PO-mU- | |
| | PO-fA-PO-mA-PO-fU-PO-fU- | | PO-mG-PO-mA-PO-mU-PO- | |
| | PO-fC-PO-mA-PO-mU-PO-mC- | | mG-PO-mA-PO-mA-PO-fU- | |
| | PO-mA-PO-mU-PO-mU-PO-mU- | | PO-mU-PO-fG-PO-mU-PO- | |
| | PO-mG-PS-mA-PS-mU-Hy | | mC-PO-mU-PS-mA-PS-mA- | |
| | | | Hy | |
| 013-c-06 | Hy-lgT7-PO-lgT7-PO-lgT7- | 862 | Hy-mA-PS-fU-PS-mC-PO- | 1024 |
| | PO-lA-PO-lG-PO-mA-PO-mC- | | mA-PO-mA-PO-fA-PO-mU- | |
| | PO-fA-PO-mA-PO-fU-PO-fU- | | PO-mG-PO-mA-PO-mU-PO- | |
| | PO-fC-PO-mA-PO-mU-PO-mC- | | mG-PO-mA-PO-mA-PO-fU- | |
| | PO-mA-PO-mU-PO-mU-PO-mU- | | PO-mU-PO-fG-PO-mU-PO- | |
| | PO-mG-PS-mA-PS-mU-Hy | | mC-PO-mU-PS-mA-PS-mA- | |
| | | | Hy | |
| 013-c-07 | Hy-lgT7-PO-lgT7-PO-lgT7- | 863 | Hy-mA-PS-fU-PS-mC-PO- | 1025 |
| | PO-lA-PO-lG-PO-mA-PO-mC- | | fA-PO-mA-PO-mA-PO-mU- | |
| | PO-lA-PO-mA-PO-fU-PO-fU- | | PO-mG-PO-fA-PO-mU-PO- | |
| | PO-fC-PO-mA-PO-mU-PO-mC- | | mG-PO-mA-PO-mA-PO-fU- | |
| | PO-mA-PO-mU-PO-mU-PO-mU- | | PO-mU-PO-fG-PO-mU-PO- | |
| | PO-mG-PS-mA-PS-mU-Hy | | mC-PO-mU-PS-mA-PS-mA- | |
| | | | Hy | |
| 013-c-08 | Hy-lgT7-PO-lgT7-PO-lgT7- | 864 | Hy-fA-PS-fU-PS-mC-PO- | 1026 |
| | PO-lA-PO-lG-PO-mA-PO-mC- | | fA-PO-mA-PO-fA-PO-mU- | |
| | PO-lA-PO-mA-PO-fU-PO-fU- | | PO-fG-PO-mA-PO-fU-PO- | |
| | PO-fC-PO-mA-PO-mU-PO-mC- | | mG-PO-mA-PO-mA-PO-fU- | |
| | PO-mA-PO-mU-PO-mU-PO-mU- | | PO-mU-PO-fG-PO-mU-PO- | |
| | PO-mG-PS-mA-PS-mU-Hy | | fC-PO-mU-PS-dT-PS-dT- | |
| | | | Hy | |
| 013-c-09 | Hy-lgT7-PO-lgT7-PO-lgT7- | 865 | Hy-mA-PS-fU-PS-mC-PO- | 1027 |
| | PO-mA-PO-mG-PO-mA-PO-mC- | | fA-PO-mA-PO-mA-PO-mU- | |
| | PO-fA-PO-mA-PO-fU-PO-mU- | | PO-mG-PO-mA-PO-mU-PO- | |
| | PO-fC-PO-fA-PO-fU-PO-mC- | | mG-PO-mA-PO-mA-PO-fU- | |
| | PO-mA-PO-mU-PO-mU-PO-mU- | | PO-mU-PO-fG-PO-mU-PO- | |
| | PO-mG-PS-mA-PS-mU-Hy | | mC-PO-mU-PS-mA-PS-mA- | |
| | | | Hy | |
| 013-c-10 | Hy-lgT7-PO-lgT7-PO-lgT7- | 866 | Hy-mA-PS-fU-PS-mC-PO- | 1028 |
| | PO-mA-PO-mG-PO-mA-PO-mC- | | mA-PO-mA-PO-fA-PO-mU- | |
| | PO-fA-PO-mA-PO-fU-PO-mU- | | PO-mG-PO-mA-PO-mU-PO- | |
| | PO-fC-PO-fA-PO-fU-PO-mC- | | mG-PO-mA-PO-mA-PO-fU- | |
| | PO-mA-PO-mU-PO-mU-PO-mU- | | PO-mU-PO-fG-PO-mU-PO- | |
| | PO-mG-PS-mA-PS-mU-Hy | | mC-PO-mU-PS-mA-PS-mA- | |
| | | | Hy | |
| 013-c-11 | Hy-lgT7-PO-lgT7-PO-lgT7- | 867 | Hy-mA-PS-fU-PS-mC-PO- | 1029 |
| | PO-mA-PO-mG-PO-mA-PO-mC- | | fA-PO-mA-PO-mA-PO-mU- | |
| | PO-fA-PO-mA-PO-fU-PO-mU- | | PO-fG-PO-mA-PO-mU-PO- | |
| | PO-fC-PO-fA-PO-fU-PO-mC- | | mG-PO-mA-PO-mA-PO-fU- | |
| | PO-mA-PO-mU-PO-mU-PO-mU- | | PO-mU-PO-fG-PO-mU-PO- | |
| | PO-mG-PS-mA-PS-mU-Hy | | mC-PO-mU-PS-mA-PS-mA- | |
| | | | Hy | |
| 013-c-12 | Hy-lgT7-PO-lgT7-PO-lgT7- | 868 | Hy-mA-PS-fU-PS-mC-PO- | 1030 |
| | PO-mA-PO-mG-PO-mA-PO-mC- | | mA-PO-mA-PO-mA-PO-mU- | |
| | PO-fA-PO-mA-PO-fU-PO-mU- | | PO-fG-PO-mA-PO-mU-PO- | |
| | PO-fC-PO-fA-PO-fU-PO-mC- | | mG-PO-mA-PO-mA-PO-fU- | |
| | PO-mA-PO-mU-PO-mU-PO-mU- | | PO-mU-PO-fG-PO-mU-PO- | |
| | PO-mG-PS-mA-PS-mU-Hy | | mC-PO-mU-PS-mA-PS-mA- | |
| | | | Hy | |
| 013-c-13 | Hy-lgT7-PO-lgT7-PO-lgT7- | 869 | Hy-fA-PS-fU-PS-mC-PO- | 1031 |
| | PO-mA-PO-mG-PO-mA-PO-mC- | | fA-PO-mA-PO-fA-PO-mU- | |
| | PO-fA-PO-mA-PO-fU-PO-mU- | | PO-fG-PO-mA-PO-mU-PO- | |
| | PO-fC-PO-fA-PO-fU-PO-mC- | | mG-PO-fA-PO-mA-PO-fU- | |
| | PO-mA-PO-mU-PO-mU-PO-mU- | | PO-mU-PO-fG-PO-mU-PO- | |
| | PO-mG-PS-mA-PS-mU-Hy | | fC-PO-mU-PS-dT-PS-dT- | |
| | | | Hy | |
| 013-c-14 | Hy-lgT7-PO-lgT7-PO-lgT7- | 870 | Hy-mA-PS-fU-PS-mC-PO- | 1032 |
| | PO-lA-PO-lG-PO-mA-PO-mC- | | fA-PO-mA-PO-mA-PO-mU- | |
| | PO-fA-PO-mA-PO-fU-PO-mU- | | PO-mG-PO-mA-PO-mU-PO- | |
| | PO-fC-PO-fA-PO-fU-PO-mC- | | mG-PO-mA-PO-mA-PO-fU- | |
| | PO-mA-PO-mU-PO-mU-PO-mU- | | PO-mU-PO-fG-PO-mU-PO- | |
| | PO-mG-PS-mA-PS-mU-Hy | | mC-PO-mU-PS-mA-PS-mA- | |
| | | | Hy | |
| 013-c-15 | Hy-lgT7-PO-lgT7-PO-lgT7- | 871 | Hy-mA-PS-fU-PS-mC-PO- | 1033 |
| | PO-lA-PO-lG-PO-mA-PO-mC- | | mA-PO-mA-PO-lA-PO-mU- | |
| | PO-fA-PO-mA-PO-fU-PO-mU- | | PO-mG-PO-mA-PO-mU-PO- | |
| | PO-fC-PO-fA-PO-fU-PO-mC- | | mG-PO-mA-PO-mA-PO-fU- | |
| | PO-mA-PO-mU-PO-mU-PO-mU- | | PO-mU-PO-fG-PO-mU-PO- | |
| | PO-mG-PS-mA-PS-mU-Hy | | mC-PO-mU-PS-mA-PS-mA- | |
| 013-c-16 | Hy-lgT7-PO-lgT7-PO-lgT7- | 872 | Hy-mA-PS-fU-PS-mC-PO- | 1034 |
| | PO-lA-PO-lG-PO-mA-PO-mC- | | fA-PO-mA-PO-mA-PO-mU- | |
| | PO-fA-PO-mA-PO-fU-PO-mU- | | PO-fG-PO-mA-PO-mU-PO- | |
| | PO-fC-PO-fA-PO-fU-PO-mC- | | mG-PO-mA-PO-mA-PO-fU- | |
| | PO-mA-PO-mU-PO-mU-PO-mU- | | PO-mU-PO-fG-PO-mU-PO- | |
| | PO-mG-PS-mA-PS-mU-Hy | | mC-PO-mU-PS-mA-PS-mA- | |
| | | | Hy | |
| 013-c-17 | Hy-lgT7-PO-lgT7-PO-lgT7- | 873 | Hy-mA-PS-fU-PS-mC-PO- | 1035 |
| | PO-lA-PO-lG-PO-mA-PO-mC- | | mA-PO-mA-PO-mA-PO-mU- | |
| | PO-fA-PO-mA-PO-fU-PO-mU- | | PO-fG-PO-mA-PO-mU-PO- | |
| | PO-fC-PO-fA-PO-fU-PO-mC- | | mG-PO-mA-PO-mA-PO-fU- | |
| | PO-mA-PO-mU-PO-mU-PO-mU- | | PO-mU-PO-fG-PO-mU-PO- | |
| | PO-mG-PS-mA-PS-mU-Hy | | mC-PO-mU-PS-mA-PS-mA- | |
| | | | Hy | |
| 013-c-18 | Hy-lgT7-PO-lgT7-PO-lgT7- | 874 | Hy-fA-PS-fU-PS-mC-PO- | 1036 |
| | PO-lA-PO-lG-PO-mA-PO-mC- | | fA-PO-mA-PO-fA-PO-mU- | |
| | PO-fA-PO-mA-PO-fU-PO-mU- | | PO-fG-PO-mA-PO-mU-PO- | |
| | PO-fC-PO-fA-PO-fU-PO-mC- | | ImG-PO-fA-PO-mA-PO-fU- | |
| | PO-mA-PO-mU-PO-mU-PO-mU- | | PO-mU-PO-fG-PO-mU-PO- | |
| | PO-mG-PS-mA-PS-mU-Hy | | fC-PO-mU-PS-dT-PS-dT- | |
| | | | Hy | |
| 013-c-19 | Hy-lgT7-PO-lgT7-PO-lgT7- | 875 | Hy-mA-PS-fU-PS-mC-PO- | 1037 |
| | PO-mA-PO-mG-PO-mA-PO-mC- | | fA-PO-mA-PO-mA-PO-mU- | |
| | PO-fA-PO-mA-PO-fU-PO-fU- | | PO-mG-PO-mA-PO-mU-PO- | |
| | PO-fC-PO-mA-PO-mU-PO-mC- | | mG-PO-mA-PO-mA-PO-fU- | |
| | PO-mA-PO-mU-PO-mU-PO-mU- | | PO-mU-PO-fG-PO-mU-PO- | |
| | PO-mG-PO-lT4-PO-lT4-Hy | | mC-PO-mU-PS-mA-PS-mA- | |
| | | | Hy | |
| 013-c-20 | Hy-lgT7-PO-lgT7-PO-lgT7- | 876 | Hy-mA-PS-fU-PS-mC-PO- | 1038 |
| | PO-mA-PO-mG-PO-mA-PO-mC- | | mA-PO-mA-PO-lA-PO-mU- | |
| | PO-fA-PO-mA-PO-fU-PO-fU- | | PO-mG-PO-mA-PO-mU-PO- | |
| | PO-fC-PO-mA-PO-mU-PO-mC- | | mG-PO-mA-PO-mA-PO-fU- | |
| | PO-mA-PO-mU-PO-mU-PO-mU- | | PO-mU-PO-fG-PO-mU-PO- | |
| | PO-mG-PO-lT4-PO-lT4-Hy | | mC-PO-mU-PS-mA-PS-mA- | |
| | | | Hy | |
| 013-c-21 | Hy-lgT7-PO-lgT7-PO-lgT7- | 877 | Hy-mA-PS-fU-PS-mC-PO- | 1039 |
| | PO-mA-PO-mG-PO-mA-PO-mC- | | fA-PO-mA-PO-mA-PO-mU- | |
| | PO-fA-PO-mA-PO-fU-PO-fU- | | PO-mG-PO-fA-PO-mU-PO- | |
| | PO-fC-PO-mA-PO-mU-PO-mC- | | mG-PO-mA-PO-mA-PO-fU- | |
| | PO-mA-PO-mU-PO-mU-PO-mU- | | PO-mU-PO-fG-PO-mU-PO- | |
| | PO-mG-PO-lT4-PO-lT4-Hy | | mC-PO-mU-PS-mA-PS-mA- | |
| | | | Hy | |
| 013-c-22 | Hy-lgT7-PO-lgT7-PO-lgT7- | 878 | Hy-fA-PS-fU-PS-mC-PO- | 1040 |
| | PO-mA-PO-mG-PO-mA-PO-mC- | | fA-PO-mA-PO-fA-PO-mU- | |
| | PO-fA-PO-mA-PO-fU-PO-fU- | | PO-fG-PO-mA-PO-fU-PO- | |
| | PO-fC-PO-mA-PO-mU-PO-mC- | | mG-PO-mA-PO-mA-PO-fU- | |
| | PO-mA-PO-mU-PO-mU-PO-mU- | | PO-mU-PO-fG-PO-mU-PO- | |
| | PO-mG-PO-lT4-PO-lT4-Hy | | fC-PO-mU-PS-dT-PS-dT- | |
| | | | Hy | |
| 013-c-23 | Hy-lgT7-PO-lgT7-PO-lgT7- | 879 | Hy-mA-PS-fU-PS-mC-PO- | 1041 |
| | PO-lA-PO-lG-PO-mA-PO-mC- | | fA-PO-mA-PO-mA-PO-mU- | |
| | PO-lA-PO-mA-PO-fU-PO-fU- | | PO-mG-PO-mA-PO-mU-PO- | |
| | PO-fC-PO-mA-PO-mU-PO-mC- | | mG-PO-mA-PO-mA-PO-fU- | |
| | PO-mA-PO-mU-PO-mU-PO-mU- | | PO-mU-PO-fG-PO-mU-PO- | |
| | PO-mG-PO-lT4-PO-lT4-Hy | | mC-PO-mU-PS-mA-PS-mA- | |
| | | | Hy | |
| 013-c-24 | Hy-lgT7-PO-lgT7-PO-lgT7- | 880 | Hy-mA-PS-fU-PS-mC-PO- | 1042 |
| | PO-lA-PO-lG-PO-mA-PO-mC- | | mA-PO-mA-PO-fA-PO-mU- | |
| | PO-fA-PO-mA-PO-fU-PO-fU- | | PO-mG-PO-mA-PO-mU-PO- | |
| | PO-fC-PO-mA-PO-mU-PO-mC- | | mG-PO-mA-PO-mA-PO-fU- | |
| | PO-mA-PO-mU-PO-mU-PO-mU- | | PO-mU-PO-fG-PO-mU-PO- | |
| | PO-mG-PO-lT4-PO-lT4-Hy | | mC-PO-mU-PS-mA-PS-mA- | |
| | | | Hy | |
| 013-c-25 | Hy-lgT7-PO-lgT7-PO-lgT7- | 881 | Hy-mA-PS-fU-PS-mC-PO- | 1043 |
| | PO-lA-PO-lG-PO-mA-PO-mC- | | fA-PO-mA-PO-mA-PO-mU- | |
| | PO-lA-PO-mA-PO-fU-PO-fU- | | PO-mG-PO-fA-PO-mU-PO- | |
| | PO-fC-PO-mA-PO-mU-PO-mC- | | mG-PO-mA-PO-mA-PO-fU- | |
| | PO-mA-PO-mU-PO-mU-PO-mU- | | PO-mU-PO-fG-PO-mU-PO- | |
| | PO-mG-PO-lT4-PO-lT4-Hy | | mC-PO-mU-PS-mA-PS-mA- | |
| | | | Hy | |
| 013-c-26 | Hy-lgT7-PO-lgT7-PO-lgT7- | 882 | Hy-fA-PS-fU-PS-mC-PO- | 1044 |
| | PO-lA-PO-lG-PO-mA-PO-mC- | | fA-PO-mA-PO-fA-PO-mU- | |
| | PO-fA-PO-mA-PO-fU-PO-fU- | | PO-fG-PO-mA-PO-fU-PO- | |
| | PO-fC-PO-mA-PO-mU-PO-mC- | | mG-PO-mA-PO-mA-PO-fU- | |
| | PO-mA-PO-mU-PO-mU-PO-mU- | | PO-mU-PO-fG-PO-mU-PO- | |
| | PO-mG-PO-lT4-PO-lT4-Hy | | fC-PO-mU-PS-dT-PS-dT- | |
| | | | Hy | |
| 013-c-27 | Hy-lgT7-PO-lgT7-PO-lgT7- | 883 | Hy-mA-PS-fU-PS-mC-PO- | 1045 |
| | PO-mA-PO-mG-PO-mA-PO-mC- | | fA-PO-mA-PO-mA-PO-mU- | |
| | PO-fA-PO-mA-PO-fU-PO-mU- | | PO-mG-PO-mA-PO-mU-PO- | |
| | PO-fC-PO-fA-PO-fU-PO-mC- | | mG-PO-mA-PO-mA-PO-fU- | |
| | PO-mA-PO-mU-PO-mU-PO-mU- | | PO-mU-PO-fG-PO-mU-PO- | |
| | PO-mG-PO-lT4-PO-lT4-Hy | | mC-PO-mU-PS-mA-PS-mA- | |
| | | | Hy | |
| 013-c-28 | Hy-lgT7-PO-lgT7-PO-lgT7- | 884 | Hy-mA-PS-fU-PS-mC-PO- | 1046 |
| | PO-mA-PO-mG-PO-mA-PO-mC- | | mA-PO-mA-PO-fA-PO-mU- | |
| | PO-fA-PO-mA-PO-fU-PO-mU- | | PO-mG-PO-mA-PO-mU-PO- | |
| | PO-fC-PO-fA-PO-fU-PO-mC- | | mG-PO-mA-PO-mA-PO-fU- | |
| | PO-mA-PO-mU-PO-mU-PO-mU- | | PO-mU-PO-fG-PO-mU-PO- | |
| | PO-mG-PO-lT4-PO-lT4-Hy | | mC-PO-mU-PS-mA-PS-mA- | |
| | | | Hy | |
| 013-c-29 | Hy-lgT7-PO-lgT7-PO-lgT7- | 885 | Hy-mA-PS-fU-PS-mC-PO- | 1047 |
| | PO-mA-PO-mG-PO-mA-PO-mC- | | fA-PO-mA-PO-mA-PO-mU- | |
| | PO-fA-PO-mA-PO-fU-PO-mU- | | PO-fG-PO-mA-PO-mU-PO- | |
| | PO-fC-PO-fA-PO-fU-PO-mC- | | mG-PO-mA-PO-mA-PO-fU- | |
| | PO-mA-PO-mU-PO-mU-PO-mU- | | PO-mU-PO-fG-PO-mU-PO- | |
| | PO-mG-PO-lT4-PO-lT4-Hy | | mC-PO-mU-PS-mA-PS-mA- | |
| | | | Hy | |
| 013-c-30 | Hy-lgT7-PO-lgT7-PO-lgT7- | 886 | Hy-mA-PS-fU-PS-mC-PO- | 1048 |
| | PO-mA-PO-mG-PO-mA-PO-mC- | | mA-PO-mA-PO-mA-PO-mU- | |
| | PO-fA-PO-mA-PO-fU-PO-mU- | | PO-fG-PO-mA-PO-mU-PO- | |
| | PO-fC-PO-fA-PO-fU-PO-mC- | | mG-PO-mA-PO-mA-PO-fU- | |
| | PO-mA-PO-mU-PO-mU-PO-mU- | | PO-mU-PO-fG-PO-mU-PO- | |
| | PO-mG-PO-lT4-PO-lT4-Hy | | mC-PO-mU-PS-mA-PS-mA- | |
| 013-c-31 | Hy-lgT7-PO-lgT7-PO-lgT7- | 887 | Hy-fA-PS-fU-PS-mC-PO- | 1049 |
| | PO-mA-PO-mG-PO-mA-PO-mC- | | fA-PO-mA-PO-fA-PO-mU- | |
| | PO-lA-PO-mA-PO-fU-PO-mU- | | PO-fG-PO-mA-PO-mU-PO- | |
| | PO-fC-PO-fA-PO-fU-PO-mC- | | mG-PO-lA-PO-mA-PO-fU- | |
| | PO-mA-PO-mU-PO-mU-PO-mU- | | PO-mU-PO-fG-PO-mU-PO- | |
| | PO-mG-PO-lT4-PO-lT4-Hy | | fC-PO-mU-PS-dT-PS-dT- | |
| | | | Hy | |
| 013-c-32 | Hy-lgT7-PO-lgT7-PO-lgT7- | 888 | Hy-mA-PS-fU-PS-mC-PO- | 1050 |
| | PO-lA-PO-lG-PO-mA-PO-mC- | | fA-PO-mA-PO-mA-PO-mU- | |
| | PO-fA-PO-mA-PO-fU-PO-mU- | | PO-mG-PO-mA-PO-mU-PO- | |
| | PO-fC-PO-fA-PO-fU-PO-mC- | | mG-PO-mA-PO-mA-PO-fU- | |
| | PO-mA-PO-mU-PO-mU-PO-mU- | | PO-mU-PO-fG-PO-mU-PO- | |
| | PO-mG-PO-lT4-PO-lT4-Hy | | mC-PO-mU-PS-mA-PS-mA- | |
| | | | Hy | |
| 013-c-33 | Hy-lgT7-PO-lgT7-PO-lgT7- | 889 | Hy-mA-PS-fU-PS-mC-PO- | 1051 |
| | PO-lA-PO-lG-PO-mA-PO-mC- | | mA-PO-mA-PO-fA-PO-mU- | |
| | PO-fA-PO-mA-PO-fU-PO-mU- | | PO-mG-PO-mA-PO-mU-PO- | |
| | PO-fC-PO-fA-PO-fU-PO-mC- | | mG-PO-mA-PO-mA-PO-fU- | |
| | PO-mA-PO-mU-PO-mU-PO-mU- | | PO-mU-PO-fG-PO-mU-PO- | |
| | PO-mG-PO-lT4-PO-lT4-Hy | | mC-PO-mU-PS-mA-PS-mA- | |
| | | | Hy | |
| 013-c-34 | Hy-lgT7-PO-lgT7-PO-lgT7- | 890 | Hy-mA-PS-fU-PS-mC-PO- | 1052 |
| | PO-lA-PO-lG-PO-mA-PO-mC- | | fA-PO-mA-PO-mA-PO-mU- | |
| | PO-fA-PO-mA-PO-fU-PO-mU- | | PO-fG-PO-mA-PO-mU-PO- | |
| | PO-fC-PO-fA-PO-fU-PO-mC- | | mG-PO-mA-PO-mA-PO-fU- | |
| | PO-mA-PO-mU-PO-mU-PO-mU- | | PO-mU-PO-fG-PO-mU-PO- | |
| | PO-mG-PO-lT4-PO-lT4-Hy | | mC-PO-mU-PS-mA-PS-mA- | |
| | | | Hy | |
| 013-c-35 | Hy-lgT7-PO-lgT7-PO-lgT7- | 891 | Hy-mA-PS-fU-PS-mC-PO- | 1053 |
| | PO-lA-PO-lG-PO-mA-PO-mC- | | mA-PO-mA-PO-mA-PO-mU- | |
| | PO-lA-PO-mA-PO-fU-PO-mU- | | PO-fG-PO-mA-PO-mU-PO- | |
| | PO-fC-PO-fA-PO-fU-PO-mC- | | mG-PO-mA-PO-mA-PO-fU- | |
| | PO-mA-PO-mU-PO-mU-PO-mU- | | PO-mU-PO-fG-PO-mU-PO- | |
| | PO-mG-PO-lT4-PO-lT4-Hy | | mC-PO-mU-PS-mA-PS-mA- | |
| | | | Hy | |
| 013-c-36 | Hy-lgT7-PO-lgT7-PO-lgT7- | 892 | Hy-fA-PS-fU-PS-mC-PO- | 1054 |
| | PO-lA-PO-lG-PO-mA-PO-mC- | | fA-PO-mA-PO-lA-PO-mU- | |
| | PO-fA-PO-mA-PO-fU-PO-mU- | | PO-fG-PO-mA-PO-mU-PO- | |
| | PO-fC-PO-fA-PO-fU-PO-mC- | | mG-PO-fA-PO-mA-PO-fU- | |
| | PO-mA-PO-mU-PO-mU-PO-mU- | | PO-mU-PO-fG-PO-mU-PO- | |
| | PO-mG-PO-lT4-PO-lT4-Hy | | fC-PO-mU-PS-dT-PS-dT- | |
| | | | Hy | |
| 013-c-37 | Hy-lgT7-PO-lgT7-PO-lgT7- | 893 | Hy-mA-PS-fU-PS-mC-PO- | 1055 |
| | PO-mA-PO-mG-PO-mA-PO-mC- | | fA-PO-mA-PO-mA-PO-mU- | |
| | PO-fA-PO-mA-PO-fU-PO-fU- | | PO-mG-PO-mA-PO-mU-PO- | |
| | PO-fC-PO-mA-PO-mU-PO-mC- | | mG-PO-mA-PO-mA-PO-fU- | |
| | PO-mA-PO-mU-PO-mU-PO-mU- | | PO-mU-PO-fG-PO-mU-PO- | |
| | PO-mG-PO-mA-PO-mU-PO-lT4- | | mC-PO-mU-PS-mA-PS-mA- | |
| | PO-lT4-Hy | | Hy | |
| 013-c-38 | Hy-lgT7-PO-lgT7-PO-lgT7- | 894 | Hy-mA-PS-fU-PS-mC-PO- | 1056 |
| | PO-mA-PO-mG-PO-mA-PO-mC- | | mA-PO-mA-PO-lA-PO-mU- | |
| | PO-fA-PO-mA-PO-fU-PO-fU- | | PO-mG-PO-mA-PO-mU-PO- | |
| | PO-fC-PO-mA-PO-mU-PO-mC- | | mG-PO-mA-PO-mA-PO-fU- | |
| | PO-mA-PO-mU-PO-mU-PO-mU- | | PO-mU-PO-fG-PO-mU-PO- | |
| | PO-mG-PO-mA-PO-mU-PO-lT4- | | mC-PO-mU-PS-mA-PS-mA- | |
| | PO-lT4-Hy | | Hy | |
| 013-c-39 | Hy-lgT7-PO-lgT7-PO-lgT7- | 895 | Hy-mA-PS-fU-PS-mC-PO- | 1057 |
| | PO-mA-PO-mG-PO-mA-PO-mC- | | fA-PO-mA-PO-mA-PO-mU- | |
| | PO-fA-PO-mA-PO-fU-PO-fU- | | PO-mG-PO-fA-PO-mU-PO- | |
| | PO-fC-PO-mA-PO-mU-PO-mC- | | mG-PO-mA-PO-mA-PO-fU- | |
| | PO-mA-PO-mU-PO-mU-PO-mU- | | PO-mU-PO-fG-PO-mU-PO- | |
| | PO-mG-PO-mA-PO-mU-PO-lT4- | | mC-PO-mU-PS-mA-PS-mA- | |
| | PO-lT4-Hy | | Hy | |
| 013-c-40 | Hy-lgT7-PO-lgT7-PO-lgT7- | 896 | Hy-fA-PS-fU-PS-mC-PO- | 1058 |
| | PO-mA-PO-mG-PO-mA-PO-mC- | | fA-PO-mA-PO-fA-PO-mU- | |
| | PO-fA-PO-mA-PO-fU-PO-fU- | | PO-fG-PO-mA-PO-fU-PO- | |
| | PO-fC-PO-mA-PO-mU-PO-mC- | | mG-PO-mA-PO-mA-PO-fU- | |
| | PO-mA-PO-mU-PO-mU-PO-mU- | | PO-mU-PO-fG-PO-mU-PO- | |
| | PO-mG-PO-mA-PO-mU-PO-lT4- | | fC-PO-mU-PS-dT-PS-dT- | |
| | PO-lT4-Hy | | Hy | |
| 013-c-41 | Hy-lgT7-PO-lgT7-PO-lgT7- | 897 | Hy-mA-PS-fU-PS-mC-PO- | 1059 |
| | PO-lA-PO-lG-PO-mA-PO-mC- | | fA-PO-mA-PO-mA-PO-mU- | |
| | PO-fA-PO-mA-PO-fU-PO-fU- | | PO-mG-PO-mA-PO-mU-PO- | |
| | PO-fC-PO-mA-PO-mU-PO-mC- | | mG-PO-mA-PO-mA-PO-fU- | |
| | PO-mA-PO-mU-PO-mU-PO-mU- | | PO-mU-PO-fG-PO-mU-PO- | |
| | PO-mG-PO-mA-PO-mU-PO-lT4- | | mC-PO-mU-PS-mA-PS-mA- | |
| | PO-lT4-Hy | | Hy | |
| 013-c-42 | Hy-lgT7-PO-lgT7-PO-lgT7- | 898 | Hy-mA-PS-fU-PS-mC-PO- | 1060 |
| | PO-lA-PO-lG-PO-mA-PO-mC- | | mA-PO-mA-PO-lA-PO-mU- | |
| | PO-fA-PO-mA-PO-fU-PO-fU- | | PO-mG-PO-mA-PO-mU-PO- | |
| | PO-fC-PO-mA-PO-mU-PO-mC- | | mG-PO-mA-PO-mA-PO-fU- | |
| | PO-mA-PO-mU-PO-mU-PO-mU- | | PO-mU-PO-fG-PO-mU-PO- | |
| | PO-mG-PO-mA-PO-mU-PO-lT4- | | mC-PO-mU-PS-mA-PS-mA- | |
| | PO-lT4-Hy | | Hy | |
| 013-c-43 | Hy-lgT7-PO-lgT7-PO-lgT7- | 899 | Hy-mA-PS-fU-PS-mC-PO- | 1061 |
| | PO-lA-PO-lG-PO-mA-PO-mC- | | fA-PO-mA-PO-mA-PO-mU- | |
| | PO-fA-PO-mA-PO-fU-PO-fU- | | PO-mG-PO-fA-PO-mU-PO- | |
| | PO-fC-PO-mA-PO-mU-PO-mC- | | mG-PO-mA-PO-mA-PO-fU- | |
| | PO-mA-PO-mU-PO-mU-PO-mU- | | PO-mU-PO-fG-PO-mU-PO- | |
| | PO-mG-PO-mA-PO-mU-PO-lT4- | | mC-PO-mU-PS-mA-PS-mA- | |
| | PO-lT4-Hy | | Hy | |
| 013-c-44 | Hy-lgT7-PO-lgT7-PO-lgT7- | 900 | Hy-fA-PS-fU-PS-mC-PO- | 1062 |
| | PO-lA-PO-lG-PO-mA-PO-mC- | | fA-PO-mA-PO-fA-PO-mU- | |
| | PO-lA-PO-mA-PO-fU-PO-fU- | | PO-fG-PO-mA-PO-fU-PO- | |
| | PO-fC-PO-mA-PO-mU-PO-mC- | | mG-PO-mA-PO-mA-PO-fU- | |
| | PO-mA-PO-mU-PO-mU-PO-mU- | | PO-mU-PO-fG-PO-mU-PO- | |
| | PO-mG-PO-mA-PO-mU-PO-lT4- | | fC-PO-mU-PS-dT-PS-dT- | |
| | PO-lT4-Hy | | Hy | |
| 013-c-45 | Hy-lgT7-PO-lgT7-PO-lgT7- | 901 | Hy-mA-PS-fU-PS-mC-PO- | 1063 |
| | PO-mA-PO-mG-PO-mA-PO-mC- | | fA-PO-mA-PO-mA-PO-mU- | |
| | PO-fA-PO-mA-PO-fU-PO-mU- | | PO-mG-PO-mA-PO-mU-PO- | |
| | PO-fC-PO-fA-PO-fU-PO-mC- | | mG-PO-mA-PO-mA-PO-fU- | |
| | PO-mA-PO-mU-PO-mU-PO-mU- | | PO-mU-PO-fG-PO-mU-PO- | |
| | PO-mG-PO-mA-PO-mU-PO-lT4- | | mC-PO-mU-PS-mA-PS-mA- | |
| | PO-lT4-Hy | | Hy | |
| 013-c-46 | Hy-lgT7-PO-lgT7-PO-lgT7- | 902 | Hy-mA-PS-fU-PS-mC-PO- | 1064 |
| | PO-mA-PO-mG-PO-mA-PO-mC- | | mA-PO-mA-PO-fA-PO-mU- | |
| | PO-fA-PO-mA-PO-fU-PO-mU- | | PO-mG-PO-mA-PO-mU-PO- | |
| | PO-fC-PO-fA-PO-fU-PO-mC- | | mG-PO-mA-PO-mA-PO-fU- | |
| | PO-mA-PO-mU-PO-mU-PO-mU- | | PO-mU-PO-fG-PO-mU-PO- | |
| | PO-mG-PO-mA-PO-mU-PO-lT4- | | mC-PO-mU-PS-mA-PS-mA- | |
| | PO-lT4-Hy | | Hy | |
| 013-c-47 | Hy-lgT7-PO-lgT7-PO-lgT7- | 903 | Hy-mA-PS-fU-PS-mC-PO- | 1065 |
| | PO-mA-PO-mG-PO-mA-PO-mC- | | fA-PO-mA-PO-mA-PO-mU- | |
| | PO-fA-PO-mA-PO-fU-PO-mU- | | PO-fG-PO-mA-PO-mU-PO- | |
| | PO-fC-PO-fA-PO-fU-PO-mC- | | mG-PO-mA-PO-mA-PO-fU- | |
| | PO-mA-PO-mU-PO-mU-PO-mU- | | PO-mU-PO-fG-PO-mU-PO- | |
| | PO-mG-PO-mA-PO-mU-PO-lT4- | | mC-PO-mU-PS-mA-PS-mA- | |
| | PO-lT4-Hy | | Hy | |
| 013-c-48 | Hy-lgT7-PO-lgT7-PO-lgT7- | 904 | Hy-mA-PS-fU-PS-mC-PO- | 1066 |
| | PO-mA-PO-mG-PO-mA-PO-mC- | | mA-PO-mA-PO-mA-PO-mU- | |
| | PO-fA-PO-mA-PO-fU-PO-mU- | | PO-fG-PO-mA-PO-mU-PO- | |
| | PO-fC-PO-fA-PO-fU-PO-mC- | | mG-PO-mA-PO-mA-PO-fU- | |
| | PO-mA-PO-mU-PO-mU-PO-mU- | | PO-mU-PO-fG-PO-mU-PO- | |
| | PO-mG-PO-mA-PO-mU-PO-lT4- | | mC-PO-mU-PS-mA-PS-mA- | |
| | PO-lT4-Hy | | Hy | |
| 013-c-49 | Hy-lgT7-PO-lgT7-PO-lgT7- | 905 | Hy-fA-PS-fU-PS-mC-PO- | 1067 |
| | PO-mA-PO-mG-PO-mA-PO-mC- | | fA-PO-mA-PO-fA-PO-mU- | |
| | PO-lA-PO-mA-PO-fU-PO-mU- | | PO-fG-PO-mA-PO-mU-PO- | |
| | PO-fC-PO-fA-PO-fU-PO-mC- | | mG-PO-fA-PO-mA-PO-fU- | |
| | PO-mA-PO-mU-PO-mU-PO-mU- | | PO-mU-PO-fG-PO-mU-PO- | |
| | PO-mG-PO-mA-PO-mU-PO-lT4- | | fC-PO-mU-PS-dT-PS-dT- | |
| | PO-lT4-Hy | | Hy | |
| 013-c-50 | Hy-lgT7-PO-lgT7-PO-lgT7- | 906 | Hy-mA-PS-fU-PS-mC-PO- | 1068 |
| | PO-lA-PO-lG-PO-mA-PO-mC- | | fA-PO-mA-PO-mA-PO-mU- | |
| | PO-fA-PO-mA-PO-fU-PO-mU- | | PO-mG-PO-mA-PO-mU-PO- | |
| | PO-fC-PO-lA-PO-fU-PO-mC- | | mG-PO-mA-PO-mA-PO-fU- | |
| | PO-mA-PO-mU-PO-mU-PO-mU- | | PO-mU-PO-fG-PO-mU-PO- | |
| | PO-mG-PO-mA-PO-mU-PO-lT4- | | mC-PO-mU-PS-mA-PS-mA- | |
| | PO-lT4-Hy | | Hy | |
| 013-c-51 | Hy-lgT7-PO-lgT7-PO-lgT7- | 907 | Hy-mA-PS-fU-PS-mC-PO- | 1069 |
| | PO-lA-PO-lG-PO-mA-PO-mC- | | mA-PO-mA-PO-fA-PO-mU- | |
| | PO-fA-PO-mA-PO-fU-PO-mU- | | PO-mG-PO-mA-PO-mU-PO- | |
| | PO-fC-PO-fA-PO-fU-PO-mC- | | mG-PO-mA-PO-mA-PO-fU- | |
| | PO-mA-PO-mU-PO-mU-PO-mU- | | PO-mU-PO-fG-PO-mU-PO- | |
| | PO-mG-PO-mA-PO-mU-PO-lT4- | | mC-PO-mU-PS-mA-PS-mA- | |
| | PO-lT4-Hy | | Hy | |
| 013-c-52 | Hy-lgT7-PO-lgT7-PO-lgT7- | 908 | Hy-mA-PS-fU-PS-mC-PO- | 1070 |
| | PO-lA-PO-lG-PO-mA-PO-mC- | | fA-PO-mA-PO-mA-PO-mU- | |
| | PO-fA-PO-mA-PO-fU-PO-mU- | | PO-fG-PO-mA-PO-mU-PO- | |
| | PO-fC-PO-fA-PO-fU-PO-mC- | | mG-PO-mA-PO-mA-PO-fU- | |
| | PO-mA-PO-mU-PO-mU-PO-mU- | | PO-mU-PO-fG-PO-mU-PO- | |
| | PO-mG-PO-mA-PO-mU-PO-lT4- | | mC-PO-mU-PS-mA-PS-mA- | |
| | PO-lT4-Hy | | Hy | |
| 013-c-53 | Hy-lgT7-PO-lgT7-PO-lgT7- | 909 | Hy-mA-PS-fU-PS-mC-PO- | 1071 |
| | PO-lA-PO-lG-PO-mA-PO-mC- | | mA-PO-mA-PO-mA-PO-mU- | |
| | PO-fA-PO-mA-PO-fU-PO-mU- | | PO-fG-PO-mA-PO-mU-PO- | |
| | PO-fC-PO-fA-PO-fU-PO-mC- | | mG-PO-mA-PO-mA-PO-fU- | |
| | PO-mA-PO-mU-PO-mU-PO-mU- | | PO-mU-PO-fG-PO-mU-PO- | |
| | PO-mG-PO-mA-PO-mU-PO-lT4- | | mC-PO-mU-PS-mA-PS-mA- | |
| | PO-lT4-Hy | | Hy | |
| 013-c-54 | Hy-lgT7-PO-lgT7-PO-lgT7- | 910 | Hy-fA-PS-fU-PS-mC-PO- | 1072 |
| | PO-lA-PO-lG-PO-mA-PO-mC- | | fA-PO-mA-PO-fA-PO-mU- | |
| | PO-fA-PO-mA-PO-fU-PO-mU- | | PO-fG-PO-mA-PO-mU-PO- | |
| | PO-fC-PO-fA-PO-fU-PO-mC- | | mG-PO-fA-PO-mA-PO-fU- | |
| | PO-mA-PO-mU-PO-mU-PO-mU- | | PO-mU-PO-fG-PO-mU-PO- | |
| | PO-mG-PO-mA-PO-mU-PO-lT4- | | fC-PO-mU-PS-dT-PS-dT- | |
| | PO-lT4-Hy | | Hy | |
| 051-c-01 | Hy-lgT7-PO-lgT7-PO-lgT7- | 911 | Hy-mU-PS-fC-PS-mU-PO- | 1073 |
| | PO-mG-PO-mU-PO-mA-PO-mU- | | fC-PO-mU-PO-mU-PO-mA- | |
| | PO-fU-PO-mA-PO-fA-PO-fA- | | PO-mA-PO-mG-PO-mG-PO- | |
| | PO-fU-PO-mC-PO-mC-PO-mU- | | mA-PO-mU-PO-mU-PO-fU- | |
| | PO-mU-PO-mA-PO-mA-PO-mG- | | PO-mA-PO-lA-PO-mU-PO- | |
| | PO-mA-PS-mG-PS-mA-Hy | | mA-PO-mC-PS-mA-PS-mA- | |
| | | | Hy | |
| 051-c-02 | Hy-lgT7-PO-lgT7-PO-lgT7- | 912 | Hy-mU-PS-fC-PS-mU-PO- | 1074 |
| | PO-mG-PO-mU-PO-mA-PO-mU- | | mC-PO-mU-PO-fU-PO-mA- | |
| | PO-fU-PO-mA-PO-fA-PO-fA- | | PO-mA-PO-mG-PO-mG-PO- | |
| | PO-fU-PO-mC-PO-mC-PO-mU- | | mA-PO-mU-PO-mU-PO-fU- | |
| | PO-mU-PO-mA-PO-mA-PO-mG- | | PO-mA-PO-fA-PO-mU-PO- | |
| | PO-mA-PS-mG-PS-mA-Hy | | mA-PO-mC-PS-mA-PS-mA- | |
| | | | Hy | |
| 051-c-03 | Hy-lgT7-PO-lgT7-PO-lgT7- | 913 | Hy-mU-PS-fC-PS-mU-PO- | 1075 |
| | PO-mG-PO-mU-PO-mA-PO-mU- | | fC-PO-mU-PO-mU-PO-mA- | |
| | PO-fU-PO-mA-PO-fA-PO-fA- | | PO-mA-PO-fG-PO-mG-PO- | |
| | PO-fU-PO-mC-PO-mC-PO-mU- | | mA-PO-mU-PO-mU-PO-fU- | |
| | PO-mU-PO-mA-PO-mA-PO-mG- | | PO-mA-PO-fA-PO-mU-PO- | |
| | PO-mA-PS-mG-PS-mA-Hy | | mA-PO-mC-PS-mA-PS-mA- | |
| | | | Hy | |
| 051-c-04 | Hy-lgT7-PO-lgT7-PO-lgT7- | 914 | Hy-fU-PS-fC-PS-mU-PO- | 1076 |
| | PO-mG-PO-mU-PO-mA-PO-mU- | | fC-PO-mU-PO-fU-PO-mA- | |
| | PO-fU-PO-mA-PO-fA-PO-fA- | | PO-fA-PO-mG-PO-fG-PO- | |
| | PO-fU-PO-mC-PO-mC-PO-mU- | | mA-PO-mU-PO-mU-PO-fU- | |
| | PO-mU-PO-mA-PO-mA-PO-mG- | | PO-mA-PO-lA-PO-mU-PO- | |
| | PO-mA-PS-mG-PS-mA-Hy | | fA-PO-mC-PS-dT-PS-dT- | |
| | | | Hy | |
| 051-c-05 | Hy-lgT7-PO-lgT7-PO-lgT7- | 915 | Hy-mU-PS-fC-PS-mU-PO- | 1077 |
| | PO-lG-PO-lU-PO-mA-PO-mU- | | fC-PO-mU-PO-mU-PO-mA- | |
| | PO-fU-PO-mA-PO-lA-PO-fA- | | PO-mA-PO-mG-PO-mG-PO- | |
| | PO-fU-PO-mC-PO-mC-PO-mU- | | mA-PO-mU-PO-mU-PO-fU- | |
| | PO-mU-PO-mA-PO-mA-PO-mG- | | PO-mA-PO-lA-PO-mU-PO- | |
| | PO-mA-PS-mG-PS-mA-Hy | | mA-PO-mC-PS-mA-PS-mA- | |
| | | | Hy | |
| 051-c-06 | Hy-lgT7-PO-lgT7-PO-lgT7- | 916 | Hy-mU-PS-fC-PS-mU-PO- | 1078 |
| | PO-lG-PO-lU-PO-mA-PO-mU- | | mC-PO-mU-PO-fU-PO-mA- | |
| | PO-fU-PO-mA-PO-fA-PO-fA- | | PO-mA-PO-mG-PO-mG-PO- | |
| | PO-fU-PO-mC-PO-mC-PO-mU- | | mA-PO-mU-PO-mU-PO-fU- | |
| | PO-mU-PO-mA-PO-mA-PO-mG- | | PO-mA-PO-lA-PO-mU-PO- | |
| | PO-mA-PS-mG-PS-mA-Hy | | mA-PO-mC-PS-mA-PS-mA- | |
| | | | Hy | |
| 051-c-07 | Hy-lgT7-PO-lgT7-PO-lgT7- | 917 | Hy-mU-PS-fC-PS-mU-PO- | 1079 |
| | PO-lG-PO-lU-PO-mA-PO-mU- | | fC-PO-mU-PO-mU-PO-mA- | |
| | PO-fU-PO-mA-PO-fA-PO-lA- | | PO-mA-PO-fG-PO-mG-PO- | |
| | PO-fU-PO-mC-PO-mC-PO-mU- | | mA-PO-mU-PO-mU-PO-fU- | |
| | PO-mU-PO-mA-PO-mA-PO-mG- | | PO-mA-PO-fA-PO-mU-PO- | |
| | PO-mA-PS-mG-PS-mA-Hy | | mA-PO-mC-PS-mA-PS-mA- | |
| | | | Hy | |
| 051-c-08 | Hy-lgT7-PO-lgT7-PO-lgT7- | 918 | Hy-fU-PS-fC-PS-mU-PO- | 1080 |
| | PO-lG-PO-lU-PO-mA-PO-mU- | | fC-PO-mU-PO-fU-PO-mA- | |
| | PO-fU-PO-mA-PO-fA-PO-fA- | | PO-fA-PO-mG-PO-fG-PO- | |
| | PO-fU-PO-mC-PO-mC-PO-mU- | | mA-PO-mU-PO-mU-PO-fU- | |
| | PO-mU-PO-mA-PO-mA-PO-mG- | | PO-mA-PO-fA-PO-mU-PO- | |
| | PO-mA-PS-mG-PS-mA-Hy | | fA-PO-mC-PS-dT-PS-dT- | |
| | | | Hy | |
| 051-c-09 | Hy-lgT7-PO-lgT7-PO-lgT7- | 919 | Hy-mU-PS-fC-PS-mU-PO- | 1081 |
| | PO-mG-PO-mU-PO-mA-PO-mU- | | fC-PO-mU-PO-mU-PO-mA- | |
| | PO-fU-PO-mA-PO-lA-PO-mA- | | PO-mA-PO-mG-PO-mG-PO- | |
| | PO-fU-PO-fC-PO-fC-PO-mU- | | mA-PO-mU-PO-mU-PO-fU- | |
| | PO-mU-PO-mA-PO-mA-PO-mG- | | PO-mA-PO-lA-PO-mU-PO- | |
| | PO-mA-PS-mG-PS-mA-Hy | | mA-PO-mC-PS-mA-PS-mA- | |
| | | | Hy | |
| 051-c-10 | Hy-lgT7-PO-lgT7-PO-lgT7- | 920 | Hy-mU-PS-fC-PS-mU-PO- | 1082 |
| | PO-mG-PO-mU-PO-mA-PO-mU- | | mC-PO-mU-PO-fU-PO-mA- | |
| | PO-fU-PO-mA-PO-fA-PO-mA- | | PO-mA-PO-mG-PO-mG-PO- | |
| | PO-fU-PO-fC-PO-fC-PO-mU- | | mA-PO-mU-PO-mU-PO-fU- | |
| | PO-mU-PO-mA-PO-mA-PO-mG- | | PO-mA-PO-fA-PO-mU-PO- | |
| | PO-mA-PS-mG-PS-mA-Hy | | mA-PO-mC-PS-mA-PS-mA- | |
| | | | Hy | |
| 051-c-11 | Hy-lgT7-PO-lgT7-PO-lgT7- | 921 | Hy-mU-PS-fC-PS-mU-PO- | 1083 |
| | PO-mG-PO-mU-PO-mA-PO-mU- | | fC-PO-mU-PO-mU-PO-mA- | |
| | PO-fU-PO-mA-PO-fA-PO-mA- | | PO-fA-PO-mG-PO-mG-PO- | |
| | PO-fU-PO-fC-PO-fC-PO-mU- | | mA-PO-mU-PO-mU-PO-fU- | |
| | PO-mU-PO-mA-PO-mA-PO-mG- | | PO-mA-PO-fA-PO-mU-PO- | |
| | PO-mA-PS-mG-PS-mA-Hy | | mA-PO-mC-PS-mA-PS-mA- | |
| | | | Hy | |
| 051-c-12 | Hy-lgT7-PO-lgT7-PO-lgT7- | 922 | Hy-mU-PS-fC-PS-mU-PO- | 1084 |
| | PO-mG-PO-mU-PO-mA-PO-mU- | | mC-PO-mU-PO-mU-PO-mA- | |
| | PO-fU-PO-mA-PO-fA-PO-mA- | | PO-fA-PO-mG-PO-mG-PO- | |
| | PO-fU-PO-fC-PO-fC-PO-mU- | | mA-PO-mU-PO-mU-PO-fU- | |
| | PO-mU-PO-mA-PO-mA-PO-mG- | | PO-mA-PO-fA-PO-mU-PO- | |
| | PO-mA-PS-mG-PS-mA-Hy | | mA-PO-mC-PS-mA-PS-mA- | |
| | | | Hy | |
| 051-c-13 | Hy-lgT7-PO-lgT7-PO-lgT7- | 923 | Hy-fU-PS-fC-PS-mU-PO- | 1085 |
| | PO-mG-PO-mU-PO-mA-PO-mU- | | fC-PO-mU-PO-fU-PO-mA- | |
| | PO-fU-PO-mA-PO-fA-PO-mA- | | PO-fA-PO-mG-PO-mG-PO- | |
| | PO-fU-PO-fC-PO-fC-PO-mU- | | mA-PO-fU-PO-mU-PO-fU- | |
| | PO-mU-PO-mA-PO-mA-PO-mG- | | PO-mA-PO-lA-PO-mU-PO- | |
| | PO-mA-PS-mG-PS-mA-Hy | | fA-PO-mC-PS-dT-PS-dT- | |
| | | | Hy | |
| 051-c-14 | Hy-lgT7-PO-lgT7-PO-lgT7- | 924 | Hy-mU-PS-fC-PS-mU-PO- | 1086 |
| | PO-lG-PO-lU-PO-mA-PO-mU- | | fC-PO-mU-PO-mU-PO-mA- | |
| | PO-fU-PO-mA-PO-fA-PO-mA- | | PO-mA-PO-mG-PO-mG-PO- | |
| | PO-fU-PO-fC-PO-fC-PO-mU- | | mA-PO-mU-PO-mU-PO-fU- | |
| | PO-mU-PO-mA-PO-mA-PO-mG- | | PO-mA-PO-fA-PO-mU-PO- | |
| | PO-mA-PS-mG-PS-mA-Hy | | mA-PO-mC-PS-mA-PS-mA- | |
| | | | Hy | |
| 051-c-15 | Hy-lgT7-PO-lgT7-PO-lgT7- | 925 | Hy-mU-PS-fC-PS-mU-PO- | 1087 |
| | PO-lG-PO-lU-PO-mA-PO-mU- | | mC-PO-mU-PO-fU-PO-mA- | |
| | PO-fU-PO-mA-PO-fA-PO-mA- | | PO-mA-PO-mG-PO-mG-PO- | |
| | PO-fU-PO-fC-PO-fC-PO-mU- | | mA-PO-mU-PO-mU-PO-fU- | |
| | PO-mU-PO-mA-PO-mA-PO-mG- | | PO-mA-PO-fA-PO-mU-PO- | |
| | PO-mA-PS-mG-PS-mA-Hy | | mA-PO-mC-PS-mA-PS-mA- | |
| 051-c-16 | Hy-lgT7-PO-lgT7-PO-lgT7- | 926 | Hy-mU-PS-fC-PS-mU-PO- | 1088 |
| | PO-lG-PO-lU-PO-mA-PO-mU- | | fC-PO-mU-PO-mU-PO-mA- | |
| | PO-fU-PO-mA-PO-fA-PO-mA- | | PO-fA-PO-mG-PO-mG-PO- | |
| | PO-fU-PO-fC-PO-fC-PO-mU- | | mA-PO-mU-PO-mU-PO-fU- | |
| | PO-mU-PO-mA-PO-mA-PO-mG- | | PO-mA-PO-fA-PO-mU-PO- | |
| | PO-mA-PS-mG-PS-mA-Hy | | mA-PO-mC-PS-mA-PS-mA- | |
| | | | Hy | |
| 051-c-17 | Hy-lgT7-PO-lgT7-PO-lgT7- | 927 | Hy-mU-PS-fC-PS-mU-PO- | 1089 |
| | PO-lG-PO-lU-PO-mA-PO-mU- | | mC-PO-mU-PO-mU-PO-mA- | |
| | PO-fU-PO-mA-PO-fA-PO-mA- | | PO-fA-PO-mG-PO-mG-PO- | |
| | PO-fU-PO-fC-PO-fC-PO-mU- | | mA-PO-mU-PO-mU-PO-fU- | |
| | PO-mU-PO-mA-PO-mA-PO-mG- | | PO-mA-PO-fA-PO-mU-PO- | |
| | PO-mA-PS-mG-PS-mA-Hy | | mA-PO-mC-PS-mA-PS-mA- | |
| | | | Hy | |
| 051-c-18 | Hy-lgT7-PO-lgT7-PO-lgT7- | 928 | Hy-fU-PS-fC-PS-mU-PO- | 1090 |
| | PO-lG-PO-lU-PO-mA-PO-mU- | | fC-PO-mU-PO-fU-PO-mA- | |
| | PO-fU-PO-mA-PO-fA-PO-mA- | | PO-fA-PO-mG-PO-mG-PO- | |
| | PO-fU-PO-fC-PO-fC-PO-mU- | | mA-PO-fU-PO-mU-PO-fU- | |
| | PO-mU-PO-mA-PO-mA-PO-mG- | | PO-mA-PO-fA-PO-mU-PO- | |
| | PO-mA-PS-mG-PS-mA-Hy | | fA-PO-mC-PS-dT-PS-dT- | |
| | | | Hy | |
| 051-c-19 | Hy-lgT7-PO-lgT7-PO-lgT7- | 929 | Hy-mU-PS-fC-PS-mU-PO- | 1091 |
| | PO-mG-PO-mU-PO-mA-PO-mU- | | fC-PO-mU-PO-mU-PO-mA- | |
| | PO-fU-PO-mA-PO-fA-PO-fA- | | PO-mA-PO-mG-PO-mG-PO- | |
| | PO-fU-PO-mC-PO-mC-PO-mU- | | mA-PO-mU-PO-mU-PO-fU- | |
| | PO-mU-PO-mA-PO-mA-PO-mG- | | PO-mA-PO-lA-PO-mU-PO- | |
| | PO-mA-PO-lT4-PO-lT4-Hy | | mA-PO-mC-PS-mA-PS-mA- | |
| | | | Hy | |
| 051-c-20 | Hy-lgT7-PO-lgT7-PO-lgT7- | 930 | Hy-mU-PS-fC-PS-mU-PO- | 1092 |
| | PO-mG-PO-mU-PO-mA-PO-mU- | | mC-PO-mU-PO-fU-PO-mA- | |
| | PO-fU-PO-mA-PO-fA-PO-fA- | | PO-mA-PO-mG-PO-mG-PO- | |
| | PO-fU-PO-mC-PO-mC-PO-mU- | | mA-PO-mU-PO-mU-PO-fU- | |
| | PO-mU-PO-mA-PO-mA-PO-mG- | | PO-mA-PO-fA-PO-mU-PO- | |
| | PO-mA-PO-lT4-PO-lT4-Hy | | mA-PO-mC-PS-mA-PS-mA- | |
| | | | Hy | |
| 051-c-21 | Hy-lgT7-PO-lgT7-PO-lgT7- | 931 | Hy-mU-PS-fC-PS-mU-PO- | 1093 |
| | PO-mG-PO-mU-PO-mA-PO-mU- | | fC-PO-mU-PO-mU-PO-mA- | |
| | PO-fU-PO-mA-PO-fA-PO-fA- | | PO-mA-PO-fG-PO-mG-PO- | |
| | PO-fU-PO-mC-PO-mC-PO-mU- | | mA-PO-mU-PO-mU-PO-fU- | |
| | PO-mU-PO-mA-PO-mA-PO-mG- | | PO-mA-PO-fA-PO-mU-PO- | |
| | PO-mA-PO-lT4-PO-lT4-Hy | | mA-PO-mC-PS-mA-PS-mA- | |
| | | | Hy | |
| 051-c-22 | Hy-lgT7-PO-lgT7-PO-lgT7- | 932 | Hy-fU-PS-fC-PS-mU-PO- | 1094 |
| | PO-mG-PO-mU-PO-mA-PO-mU- | | fC-PO-mU-PO-fU-PO-mA- | |
| | PO-fU-PO-mA-PO-fA-PO-fA- | | PO-fA-PO-mG-PO-fG-PO- | |
| | PO-fU-PO-mC-PO-mC-PO-mU- | | mA-PO-mU-PO-mU-PO-fU- | |
| | PO-mU-PO-mA-PO-mA-PO-mG- | | PO-mA-PO-fA-PO-mU-PO- | |
| | PO-mA-PO-lT4-PO-lT4-Hy | | fA-PO-mC-PS-dT-PS-dT- | |
| | | | Hy | |
| 051-c-23 | Hy-lgT7-PO-lgT7-PO-lgT7- | 933 | Hy-mU-PS-fC-PS-mU-PO- | 1095 |
| | PO-lG-PO-lU-PO-mA-PO-mU- | | fC-PO-mU-PO-mU-PO-mA- | |
| | PO-fU-PO-mA-PO-fA-PO-fA- | | PO-mA-PO-mG-PO-mG-PO- | |
| | PO-fU-PO-mC-PO-mC-PO-mU- | | mA-PO-mU-PO-mU-PO-fU- | |
| | PO-mU-PO-mA-PO-mA-PO-mG- | | PO-mA-PO-fA-PO-mU-PO- | |
| | PO-mA-PO-lT4-PO-lT4-Hy | | mA-PO-mC-PS-mA-PS-mA- | |
| | | | Hy | |
| 051-c-24 | Hy-lgT7-PO-lgT7-PO-lgT7- | 934 | Hy-mU-PS-fC-PS-mU-PO- | 1096 |
| | PO-lG-PO-lU-PO-mA-PO-mU- | | mC-PO-mU-PO-fU-PO-mA- | |
| | PO-fU-PO-mA-PO-fA-PO-fA- | | PO-mA-PO-mG-PO-mG-PO- | |
| | PO-fU-PO-mC-PO-mC-PO-mU- | | mA-PO-mU-PO-mU-PO-fU- | |
| | PO-mU-PO-mA-PO-mA-PO-mG- | | PO-mA-PO-fA-PO-mU-PO- | |
| | PO-mA-PO-lT4-PO-lT4-Hy | | mA-PO-mC-PS-mA-PS-mA- | |
| | | | Hy | |
| 051-c-25 | Hy-lgT7-PO-lgT7-PO-lgT7- | 935 | Hy-mU-PS-fC-PS-mU-PO- | 1097 |
| | PO-lG-PO-lU-PO-mA-PO-mU- | | fC-PO-mU-PO-mU-PO-mA- | |
| | PO-fU-PO-mA-PO-fA-PO-fA- | | PO-mA-PO-fG-PO-mG-PO- | |
| | PO-fU-PO-mC-PO-mC-PO-mU- | | mA-PO-mU-PO-mU-PO-fU- | |
| | PO-mU-PO-mA-PO-mA-PO-mG- | | PO-mA-PO-fA-PO-mU-PO- | |
| | PO-mA-PO-lT4-PO-lT4-Hy | | mA-PO-mC-PS-mA-PS-mA- | |
| | | | Hy | |
| 051-c-26 | Hy-lgT7-PO-lgT7-PO-lgT7- | 936 | Hy-fU-PS-fC-PS-mU-PO- | 1098 |
| | PO-lG-PO-lU-PO-mA-PO-mU- | | fC-PO-mU-PO-fU-PO-mA- | |
| | PO-fU-PO-mA-PO-fA-PO-fA- | | PO-fA-PO-mG-PO-fG-PO- | |
| | PO-fU-PO-mC-PO-mC-PO-mU- | | mA-PO-mU-PO-mU-PO-fU- | |
| | PO-mU-PO-mA-PO-mA-PO-mG- | | PO-mA-PO-lA-PO-mU-PO- | |
| | PO-mA-PO-lT4-PO-lT4-Hy | | fA-PO-mC-PS-dT-PS-dT- | |
| | | | Hy | |
| 051-c-27 | Hy-lgT7-PO-lgT7-PO-lgT7- | 937 | Hy-mU-PS-fC-PS-mU-PO- | 1099 |
| | PO-mG-PO-mU-PO-mA-PO-mU- | | fC-PO-mU-PO-mU-PO-mA- | |
| | PO-fU-PO-mA-PO-lA-PO-mA- | | PO-mA-PO-mG-PO-mG-PO- | |
| | PO-fU-PO-fC-PO-fC-PO-mU- | | mA-PO-mU-PO-mU-PO-fU- | |
| | PO-mU-PO-mA-PO-mA-PO-mG- | | PO-mA-PO-fA-PO-mU-PO- | |
| | PO-mA-PO-lT4-PO-lT4-Hy | | mA-PO-mC-PS-mA-PS-mA- | |
| 051-c-28 | Hy-lgT7-PO-lgT7-PO-lgT7- | 938 | Hy-mU-PS-fC-PS-mU-PO- | 1100 |
| | PO-mG-PO-mU-PO-mA-PO-mU- | | mC-PO-mU-PO-fU-PO-mA- | |
| | PO-fU-PO-mA-PO-fA-PO-mA- | | PO-mA-PO-mG-PO-mG-PO- | |
| | PO-fU-PO-fC-PO-fC-PO-mU- | | mA-PO-mU-PO-mU-PO-fU- | |
| | PO-mU-PO-mA-PO-mA-PO-mG- | | PO-mA-PO-fA-PO-mU-PO- | |
| | PO-mA-PO-lT4-PO-lT4-Hy | | mA-PO-mC-PS-mA-PS-mA- | |
| | | | Hy | |
| 051-c-29 | Hy-lgT7-PO-lgT7-PO-lgT7- | 939 | Hy-mU-PS-fC-PS-mU-PO- | 1101 |
| | PO-mG-PO-mU-PO-mA-PO-mU- | | fC-PO-mU-PO-mU-PO-mA- | |
| | PO-fU-PO-mA-PO-fA-PO-mA- | | PO-fA-PO-mG-PO-mG-PO- | |
| | PO-fU-PO-fC-PO-fC-PO-mU- | | mA-PO-mU-PO-mU-PO-fU- | |
| | PO-mU-PO-mA-PO-mA-PO-mG- | | PO-mA-PO-fA-PO-mU-PO- | |
| | PO-mA-PO-lT4-PO-lT4-Hy | | mA-PO-mC-PS-mA-PS-mA- | |
| | | | Hy | |
| 051-c-30 | Hy-lgT7-PO-lgT7-PO-lgT7- | 940 | Hy-mU-PS-fC-PS-mU-PO- | 1102 |
| | PO-mG-PO-mU-PO-mA-PO-mU- | | mC-PO-mU-PO-mU-PO-mA- | |
| | PO-fU-PO-mA-PO-fA-PO-mA- | | PO-fA-PO-mG-PO-mG-PO- | |
| | PO-fU-PO-fC-PO-fC-PO-mU- | | mA-PO-mU-PO-mU-PO-fU- | |
| | PO-mU-PO-mA-PO-mA-PO-mG- | | PO-mA-PO-fA-PO-mU-PO- | |
| | PO-mA-PO-lT4-PO-lT4-Hy | | mA-PO-mC-PS-mA-PS-mA- | |
| | | | Hy | |
| 051-c-31 | Hy-lgT7-PO-lgT7-PO-lgT7- | 941 | Hy-fU-PS-fC-PS-mU-PO- | 1103 |
| | PO-mG-PO-mU-PO-mA-PO-mU- | | fC-PO-mU-PO-fU-PO-mA- | |
| | PO-fU-PO-mA-PO-fA-PO-mA- | | PO-fA-PO-mG-PO-mG-PO- | |
| | PO-fU-PO-fC-PO-fC-PO-mU- | | mA-PO-fU-PO-mU-PO-fU- | |
| | PO-mU-PO-mA-PO-mA-PO-mG- | | PO-mA-PO-fA-PO-mU-PO- | |
| | PO-mA-PO-lT4-PO-lT4-Hy | | fA-PO-mC-PS-dT-PS-dT- | |
| | | | Hy | |
| 051-c-32 | Hy-lgT7-PO-lgT7-PO-lgT7- | 942 | Hy-mU-PS-fC-PS-mU-PO- | 1104 |
| | PO-lG-PO-lU-PO-mA-PO-mU- | | fC-PO-mU-PO-mU-PO-mA- | |
| | PO-fU-PO-mA-PO-fA-PO-mA- | | PO-mA-PO-mG-PO-mG-PO- | |
| | PO-fU-PO-fC-PO-fC-PO-mU- | | mA-PO-mU-PO-mU-PO-fU- | |
| | PO-mU-PO-mA-PO-mA-PO-mG- | | PO-mA-PO-fA-PO-mU-PO- | |
| | PO-mA-PO-lT4-PO-lT4-Hy | | mA-PO-mC-PS-mA-PS-mA- | |
| | | | Hy | |
| 051-c-33 | Hy-lgT7-PO-lgT7-PO-lgT7- | 943 | Hy-mU-PS-fC-PS-mU-PO- | 1105 |
| | PO-lG-PO-lU-PO-mA-PO-mU- | | mC-PO-mU-PO-fU-PO-mA- | |
| | PO-fU-PO-mA-PO-fA-PO-mA- | | PO-mA-PO-mG-PO-mG-PO- | |
| | PO-fU-PO-fC-PO-fC-PO-mU- | | mA-PO-mU-PO-mU-PO-fU- | |
| | PO-mU-PO-mA-PO-mA-PO-mG- | | PO-mA-PO-fA-PO-mU-PO- | |
| | PO-mA-PO-lT4-PO-lT4-Hy | | mA-PO-mC-PS-mA-PS-mA- | |
| | | | Hy | |
| 051-c-34 | Hy-lgT7-PO-lgT7-PO-lgT7- | 944 | Hy-mU-PS-fC-PS-mU-PO- | 1106 |
| | PO-lG-PO-lU-PO-mA-PO-mU- | | fC-PO-mU-PO-mU-PO-mA- | |
| | PO-fU-PO-mA-PO-fA-PO-mA- | | PO-fA-PO-mG-PO-mG-PO- | |
| | PO-fU-PO-fC-PO-fC-PO-mU- | | mA-PO-mU-PO-mU-PO-fU- | |
| | PO-mU-PO-mA-PO-mA-PO-mG- | | PO-mA-PO-fA-PO-mU-PO- | |
| | PO-mA-PO-lT4-PO-lT4-Hy | | mA-PO-mC-PS-mA-PS-mA- | |
| | | | Hy | |
| 051-c-35 | Hy-lgT7-PO-lgT7-PO-lgT7- | 945 | Hy-mU-PS-fC-PS-mU-PO- | 1107 |
| | PO-lG-PO-lU-PO-mA-PO-mU- | | mC-PO-mU-PO-mU-PO-mA- | |
| | PO-fU-PO-mA-PO-fA-PO-mA- | | PO-fA-PO-mG-PO-mG-PO- | |
| | PO-fU-PO-fC-PO-fC-PO-mU- | | mA-PO-mU-PO-mU-PO-fU- | |
| | PO-mU-PO-mA-PO-mA-PO-mG- | | PO-mA-PO-fA-PO-mU-PO- | |
| | PO-mA-PO-lT4-PO-lT4-Hy | | mA-PO-mC-PS-mA-PS-mA- | |
| | | | Hy | |
| 051-c-36 | Hy-lgT7-PO-lgT7-PO-lgT7- | 946 | Hy-fU-PS-fC-PS-mU-PO- | 1108 |
| | PO-lG-PO-lU-PO-mA-PO-mU- | | fC-PO-mU-PO-fU-PO-mA- | |
| | PO-fU-PO-mA-PO-fA-PO-mA- | | PO-fA-PO-mG-PO-mG-PO- | |
| | PO-fU-PO-fC-PO-fC-PO-mU- | | mA-PO-fU-PO-mU-PO-fU- | |
| | PO-mU-PO-mA-PO-mA-PO-mG- | | PO-mA-PO-fA-PO-mU-PO- | |
| | PO-mA-PO-lT4-PO-lT4-Hy | | fA-PO-mC-PS-dT-PS-dT- | |
| | | | Hy | |
| 051-c-37 | Hy-lgT7-PO-lgT7-PO-lgT7- | 947 | Hy-mU-PS-fC-PS-mU-PO- | 1109 |
| | PO-mG-PO-mU-PO-mA-PO-mU- | | fC-PO-mU-PO-mU-PO-mA- | |
| | PO-fU-PO-mA-PO-fA-PO-fA- | | PO-mA-PO-mG-PO-mG-PO- | |
| | PO-fU-PO-mC-PO-mC-PO-mU- | | mA-PO-mU-PO-mU-PO-fU- | |
| | PO-mU-PO-mA-PO-mA-PO-mG- | | PO-mA-PO-fA-PO-mU-PO- | |
| | PO-mA-PO-mG-PO-mA-PO-lT4- | | mA-PO-mC-PS-mA-PS-mA- | |
| | PO-lT4-Hy | | Hy | |
| 051-c-38 | Hy-lgT7-PO-lgT7-PO-lgT7- | 948 | Hy-mU-PS-fC-PS-mU-PO- | 1110 |
| | PO-mG-PO-mU-PO-mA-PO-mU- | | mC-PO-mU-PO-fU-PO-mA- | |
| | PO-fU-PO-mA-PO-fA-PO-fA- | | PO-mA-PO-mG-PO-mG-PO- | |
| | PO-fU-PO-mC-PO-mC-PO-mU- | | mA-PO-mU-PO-mU-PO-fU- | |
| | PO-mU-PO-mA-PO-mA-PO-mG- | | PO-mA-PO-fA-PO-mU-PO- | |
| | PO-mA-PO-mG-PO-mA-PO-lT4- | | mA-PO-mC-PS-mA-PS-mA- | |
| | PO-lT4-Hy | | Hy | |
| 051-c-39 | Hy-lgT7-PO-lgT7-PO-lgT7- | 949 | Hy-mU-PS-fC-PS-mU-PO- | 1111 |
| | PO-mG-PO-mU-PO-mA-PO-mU- | | fC-PO-mU-PO-mU-PO-mA- | |
| | PO-fU-PO-mA-PO-fA-PO-fA- | | PO-mA-PO-fG-PO-mG-PO- | |
| | PO-fU-PO-mC-PO-mC-PO-mU- | | mA-PO-mU-PO-mU-PO-fU- | |
| | PO-mU-PO-mA-PO-mA-PO-mG- | | PO-mA-PO-fA-PO-mU-PO- | |
| | PO-mA-PO-mG-PO-mA-PO-lT4- | | mA-PO-mC-PS-mA-PS-mA- | |
| | PO-lT4-Hy | | Hy | |
| 051-c-40 | Hy-lgT7-PO-lgT7-PO-lgT7- | 950 | Hy-fU-PS-fC-PS-mU-PO- | 1112 |
| | PO-mG-PO-mU-PO-mA-PO-mU- | | fC-PO-mU-PO-fU-PO-mA- | |
| | PO-fU-PO-mA-PO-fA-PO-fA- | | PO-fA-PO-mG-PO-fG-PO- | |
| | PO-fU-PO-mC-PO-mC-PO-mU- | | mA-PO-mU-PO-mU-PO-fU- | |
| | PO-mU-PO-mA-PO-mA-PO-mG- | | PO-mA-PO-fA-PO-mU-PO- | |
| | PO-mA-PO-mG-PO-mA-PO-lT4- | | fA-PO-mC-PS-dT-PS-dT- | |
| | PO-lT4-Hy | | | |
| 051-c-41 | Hy-lgT7-PO-lgT7-PO-lgT7- | 951 | Hy-mU-PS-fC-PS-mU-PO- | 1113 |
| | PO-lG-PO-lU-PO-mA-PO-mU- | | fC-PO-mU-PO-mU-PO-mA- | |
| | PO-fU-PO-mA-PO-fA-PO-fA- | | PO-mA-PO-mG-PO-mG-PO- | |
| | PO-fU-PO-mC-PO-mC-PO-mU- | | mA-PO-mU-PO-mU-PO-fU- | |
| | PO-mU-PO-mA-PO-mA-PO-mG- | | PO-mA-PO-fA-PO-mU-PO- | |
| | PO-mA-PO-mG-PO-mA-PO-lT4- | | mA-PO-mC-PS-mA-PS-mA- | |
| | PO-lT4-Hy | | Hy | |
| 051-c-42 | Hy-lgT7-PO-lgT7-PO-lgT7- | 952 | Hy-mU-PS-fC-PS-mU-PO- | 1114 |
| | PO-lG-PO-lU-PO-mA-PO-mU- | | mC-PO-mU-PO-fU-PO-mA- | |
| | PO-fU-PO-mA-PO-fA-PO-fA- | | PO-mA-PO-mG-PO-mG-PO- | |
| | PO-fU-PO-mC-PO-mC-PO-mU- | | mA-PO-mU-PO-mU-PO-fU- | |
| | PO-mU-PO-mA-PO-mA-PO-mG- | | PO-mA-PO-fA-PO-mU-PO- | |
| | PO-mA-PO-mG-PO-mA-PO-lT4- | | mA-PO-mC-PS-mA-PS-mA- | |
| | PO-lT4-Hy | | Hy | |
| 051-c-43 | Hy-lgT7-PO-lgT7-PO-lgT7- | 953 | Hy-mU-PS-fC-PS-mU-PO- | 1115 |
| | PO-lG-PO-lU-PO-mA-PO-mU- | | fC-PO-mU-PO-mU-PO-mA- | |
| | PO-fU-PO-mA-PO-fA-PO-fA- | | PO-mA-PO-fG-PO-mG-PO- | |
| | PO-fU-PO-mC-PO-mC-PO-mU- | | mA-PO-mU-PO-mU-PO-fU- | |
| | PO-mU-PO-mA-PO-mA-PO-mG- | | PO-mA-PO-fA-PO-mU-PO- | |
| | PO-mA-PO-mG-PO-mA-PO-lT4- | | mA-PO-mC-PS-mA-PS-mA- | |
| | PO-lT4-Hy | | Hy | |
| 051-c-44 | Hy-lgT7-PO-lgT7-PO-lgT7- | 954 | Hy-fU-PS-fC-PS-mU-PO- | 1116 |
| | PO-lG-PO-lU-PO-mA-PO-mU- | | fC-PO-mU-PO-fU-PO-mA- | |
| | PO-fU-PO-mA-PO-fA-PO-fA- | | PO-fA-PO-mG-PO-fG-PO- | |
| | PO-fU-PO-mC-PO-mC-PO-mU- | | mA-PO-mU-PO-mU-PO-fU- | |
| | PO-mU-PO-mA-PO-mA-PO-mG- | | PO-mA-PO-fA-PO-mU-PO- | |
| | PO-mA-PO-mG-PO-mA-PO-lT4- | | fA-PO-mC-PS-dT-PS-dT- | |
| | PO-lT4-Hy | | Hy | |
| 051-c-45 | Hy-lgT7-PO-lgT7-PO-lgT7- | 955 | Hy-mU-PS-fC-PS-mU-PO- | 1117 |
| | PO-mG-PO-mU-PO-mA-PO-mU- | | fC-PO-mU-PO-mU-PO-mA- | |
| | PO-fU-PO-mA-PO-fA-PO-mA- | | PO-mA-PO-mG-PO-mG-PO- | |
| | PO-fU-PO-fC-PO-fC-PO-mU- | | mA-PO-mU-PO-mU-PO-fU- | |
| | PO-mU-PO-mA-PO-mA-PO-mG- | | PO-mA-PO-fA-PO-mU-PO- | |
| | PO-mA-PO-mG-PO-mA-PO-lT4- | | mA-PO-mC-PS-mA-PS-mA- | |
| | PO-lT4-Hy | | Hy | |
| 051-c-46 | Hy-lgT7-PO-lgT7-PO-lgT7- | 956 | Hy-mU-PS-fC-PS-mU-PO- | 1118 |
| | PO-mG-PO-mU-PO-mA-PO-mU- | | mC-PO-mU-PO-fU-PO-mA- | |
| | PO-fU-PO-mA-PO-fA-PO-mA- | | PO-mA-PO-mG-PO-mG-PO- | |
| | PO-fU-PO-fC-PO-fC-PO-mU- | | mA-PO-mU-PO-mU-PO-fU- | |
| | PO-mU-PO-mA-PO-mA-PO-mG- | | PO-mA-PO-lA-PO-mU-PO- | |
| | PO-mA-PO-mG-PO-mA-PO-lT4- | | mA-PO-mC-PS-mA-PS-mA- | |
| | PO-lT4-Hy | | Hy | |
| 051-c-47 | Hy-lgT7-PO-lgT7-PO-lgT7- | 957 | Hy-mU-PS-fC-PS-mU-PO- | 1119 |
| | PO-mG-PO-mU-PO-mA-PO-mU- | | fC-PO-mU-PO-mU-PO-mA- | |
| | PO-fU-PO-mA-PO-fA-PO-mA- | | PO-fA-PO-mG-PO-mG-PO- | |
| | PO-fU-PO-fC-PO-fC-PO-mU- | | mA-PO-mU-PO-mU-PO-fU- | |
| | PO-mU-PO-mA-PO-mA-PO-mG- | | PO-mA-PO-fA-PO-mU-PO- | |
| | PO-mA-PO-mG-PO-mA-PO-lT4- | | mA-PO-mC-PS-mA-PS-mA- | |
| | PO-lT4-Hy | | Hy | |
| 051-c-48 | Hy-lgT7-PO-lgT7-PO-lgT7- | 958 | Hy-mU-PS-fC-PS-mU-PO- | 1120 |
| | PO-mG-PO-mU-PO-mA-PO-mU- | | mC-PO-mU-PO-mU-PO-mA- | |
| | PO-fU-PO-mA-PO-fA-PO-mA- | | PO-fA-PO-mG-PO-mG-PO- | |
| | PO-fU-PO-fC-PO-fC-PO-mU- | | mA-PO-mU-PO-mU-PO-fU- | |
| | PO-mU-PO-mA-PO-mA-PO-mG- | | PO-mA-PO-fA-PO-mU-PO- | |
| | PO-mA-PO-mG-PO-mA-PO-lT4- | | mA-PO-mC-PS-mA-PS-mA- | |
| | PO-lT4-Hy | | Hy | |
| 051-c-49 | Hy-lgT7-PO-lgT7-PO-lgT7- | 959 | Hy-fU-PS-fC-PS-mU-PO- | 1121 |
| | PO-mG-PO-mU-PO-mA-PO-mU- | | fC-PO-mU-PO-fU-PO-mA- | |
| | PO-fU-PO-mA-PO-fA-PO-mA- | | PO-fA-PO-mG-PO-mG-PO- | |
| | PO-fU-PO-fC-PO-fC-PO-mU- | | mA-PO-fU-PO-mU-PO-fU- | |
| | PO-mU-PO-mA-PO-mA-PO-mG- | | PO-mA-PO-fA-PO-mU-PO- | |
| | PO-mA-PO-mG-PO-mA-PO-lT4- | | fA-PO-mC-PS-dT-PS-dT- | |
| | PO-lT4-Hy | | Hy | |
| 051-c-50 | Hy-lgT7-PO-lgT7-PO-lgT7- | 960 | Hy-mU-PS-fC-PS-mU-PO- | 1122 |
| | PO-lG-PO-lU-PO-mA-PO-mU- | | fC-PO-mU-PO-mU-PO-mA- | |
| | PO-fU-PO-mA-PO-fA-PO-mA- | | PO-mA-PO-mG-PO-mG-PO- | |
| | PO-fU-PO-fC-PO-fC-PO-mU- | | mA-PO-mU-PO-mU-PO-fU- | |
| | PO-mU-PO-mA-PO-mA-PO-mG- | | PO-mA-PO-fA-PO-mU-PO- | |
| | PO-mA-PO-mG-PO-mA-PO-lT4- | | mA-PO-mC-PS-mA-PS-mA- | |
| | PO-lT4-Hy | | Hy | |
| 051-c-51 | Hy-lgT7-PO-lgT7-PO-lgT7- | 961 | Hy-mU-PS-fC-PS-mU-PO- | 1123 |
| | PO-lG-PO-lU-PO-mA-PO-mU- | | mC-PO-mU-PO-fU-PO-mA- | |
| | PO-fU-PO-mA-PO-fA-PO-mA- | | PO-mA-PO-mG-PO-mG-PO- | |
| | PO-fU-PO-fC-PO-fC-PO-mU- | | mA-PO-mU-PO-mU-PO-fU- | |
| | PO-mU-PO-mA-PO-mA-PO-mG- | | PO-mA-PO-lA-PO-mU-PO- | |
| | PO-mA-PO-mG-PO-mA-PO-lT4- | | mA-PO-mC-PS-mA-PS-mA- | |
| | PO-lT4-Hy | | Hy | |
| 051-c-52 | Hy-lgT7-PO-lgT7-PO-lgT7- | 962 | Hy-mU-PS-fC-PS-mU-PO- | 1124 |
| | PO-lG-PO-lU-PO-mA-PO-mU- | | fC-PO-mU-PO-mU-PO-mA- | |
| | PO-fU-PO-mA-PO-fA-PO-mA- | | PO-fA-PO-mG-PO-mG-PO- | |
| | PO-fU-PO-fC-PO-fC-PO-mU- | | mA-PO-mU-PO-mU-PO-fU- | |
| | PO-mU-PO-mA-PO-mA-PO-mG- | | PO-mA-PO-fA-PO-mU-PO- | |
| | PO-mA-PO-mG-PO-mA-PO-lT4- | | mA-PO-mC-PS-mA-PS-mA- | |
| | PO-lT4-Hy | | Hy | |
| 051-c-53 | Hy-lgT7-PO-lgT7-PO-lgT7- | 963 | Hy-mU-PS-fC-PS-mU-PO- | 1125 |
| | PO-lG-PO-lU-PO-mA-PO-mU- | | mC-PO-mU-PO-mU-PO-mA- | |
| | PO-fU-PO-mA-PO-fA-PO-mA- | | PO-fA-PO-mG-PO-mG-PO- | |
| | PO-fU-PO-fC-PO-fC-PO-mU- | | mA-PO-mU-PO-mU-PO-fU- | |
| | PO-mU-PO-mA-PO-mA-PO-mG- | | PO-mA-PO-fA-PO-mU-PO- | |
| | PO-mA-PO-mG-PO-mA-PO-lT4- | | mA-PO-mC-PS-mA-PS-mA- | |
| | PO-lT4-Hy | | Hy | |
| 051-c-54 | Hy-lgT7-PO-lgT7-PO-lgT7- | 964 | Hy-fU-PS-fC-PS-mU-PO- | 1126 |
| | PO-lG-PO-lU-PO-mA-PO-mU- | | fC-PO-mU-PO-fU-PO-mA- | |
| | PO-fU-PO-mA-PO-fA-PO-mA- | | PO-fA-PO-mG-PO-mG-PO- | |
| | PO-fU-PO-fC-PO-fC-PO-mU- | | mA-PO-fU-PO-mU-PO-fU- | |
| | PO-mU-PO-mA-PO-mA-PO-mG- | | PO-mA-PO-lA-PO-mU-PO- | |
| | PO-mA-PO-mG-PO-mA-PO-lT4- | | fA-PO-mC-PS-dT-PS-dT- | |
| | PO-lT4-Hy | | Hy | |
| 165-c-01 | Hy-lgT7-PO-lgT7-PO-lgT7- | 965 | Hy-mA-PS-fU-PS-mG-PO- | 1127 |
| | PO-mA-PO-mU-PO-mU-PO-mG- | | fA-PO-mA-PO-mU-PO-mU- | |
| | PO-fA-PO-mU-PO-fC-PO-fA- | | PO-mG-PO-mU-PO-mC-PO- | |
| | PO-fA-PO-mG-PO-mA-PO-mC- | | mU-PO-mU-PO-mG-PO-fA- | |
| | PO-mA-PO-mA-PO-mU-PO-mU- | | PO-mU-PO-fC-PO-mA-PO- | |
| | PO-mC-PS-mA-PS-mU-Hy | | mA-PO-mU-PS-mA-PS-mA- | |
| | | | Hy | |
| 165-c-02 | Hy-lgT7-PO-lgT7-PO-lgT7- | 966 | Hy-mA-PS-fU-PS-mG-PO- | 1128 |
| | PO-mA-PO-mU-PO-mU-PO-mG- | | mA-PO-mA-PO-fU-PO-mU- | |
| | PO-fA-PO-mU-PO-fC-PO-fA- | | PO-mG-PO-mU-PO-mC-PO- | |
| | PO-fA-PO-mG-PO-mA-PO-mC- | | mU-PO-mU-PO-mG-PO-fA- | |
| | PO-mA-PO-mA-PO-mU-PO-mU- | | PO-mU-PO-fC-PO-mA-PO- | |
| | PO-mC-PS-mA-PS-mU-Hy | | mA-PO-mU-PS-mA-PS-mA- | |
| | | | Hy | |
| 165-c-03 | Hy-lgT7-PO-lgT7-PO-lgT7- | 967 | Hy-mA-PS-fU-PS-mG-PO- | 1129 |
| | PO-mA-PO-mU-PO-mU-PO-mG- | | fA-PO-mA-PO-mU-PO-mU- | |
| | PO-fA-PO-mU-PO-fC-PO-fA- | | PO-mG-PO-fU-PO-mC-PO- | |
| | PO-fA-PO-mG-PO-mA-PO-mC- | | mU-PO-mU-PO-mG-PO-fA- | |
| | PO-mA-PO-mA-PO-mU-PO-mU- | | PO-mU-PO-fC-PO-mA-PO- | |
| | PO-mC-PS-mA-PS-mU-Hy | | mA-PO-mU-PS-mA-PS-mA- | |
| | | | Hy | |
| 165-c-04 | Hy-lgT7-PO-lgT7-PO-lgT7- | 968 | Hy-fA-PS-fU-PS-mG-PO- | 1130 |
| | PO-mA-PO-mU-PO-mU-PO-mG- | | fA-PO-mA-PO-fU-PO-mU- | |
| | PO-fA-PO-mU-PO-fC-PO-fA- | | PO-fG-PO-mU-PO-fC-PO- | |
| | PO-fA-PO-mG-PO-mA-PO-mC- | | mU-PO-mU-PO-mG-PO-fA- | |
| | PO-mA-PO-mA-PO-mU-PO-mU- | | PO-mU-PO-fC-PO-mA-PO- | |
| | PO-mC-PS-mA-PS-mU-Hy | | fA-PO-mU-PS-dT-PS-dT- | |
| | | | Hy | |
| 165-c-05 | Hy-lgT7-PO-lgT7-PO-lgT7- | 969 | Hy-mA-PS-fU-PS-mG-PO- | 1131 |
| | PO-lA-PO-lU-PO-mU-PO-mG- | | fA-PO-mA-PO-mU-PO-mU- | |
| | PO-fA-PO-mU-PO-fC-PO-fA- | | PO-mG-PO-mU-PO-mC-PO- | |
| | PO-fA-PO-mG-PO-mA-PO-mC- | | mU-PO-mU-PO-mG-PO-fA- | |
| | PO-mA-PO-mA-PO-mU-PO-mU- | | PO-mU-PO-fC-PO-mA-PO- | |
| | PO-mC-PS-mA-PS-mU-Hy | | mA-PO-mU-PS-mA-PS-mA- | |
| | | | Hy | |
| 165-c-06 | Hy-lgT7-PO-lgT7-PO-lgT7- | 970 | Hy-mA-PS-fU-PS-mG-PO- | 1132 |
| | PO-lA-PO-lU-PO-mU-PO-mG- | | mA-PO-mA-PO-fU-PO-mU- | |
| | PO-lA-PO-mU-PO-fC-PO-fA- | | PO-mG-PO-mU-PO-mC-PO- | |
| | PO-fA-PO-mG-PO-mA-PO-mC- | | mU-PO-mU-PO-mG-PO-fA- | |
| | PO-mA-PO-mA-PO-mU-PO-mU- | | PO-mU-PO-fC-PO-mA-PO- | |
| | PO-mC-PS-mA-PS-mU-Hy | | mA-PO-mU-PS-mA-PS-mA- | |
| | | | Hy | |
| 165-c-07 | Hy-lgT7-PO-lgT7-PO-lgT7- | 971 | Hy-mA-PS-fU-PS-mG-PO- | 1133 |
| | PO-lA-PO-lU-PO-mU-PO-mG- | | fA-PO-mA-PO-mU-PO-mU- | |
| | PO-fA-PO-mU-PO-fC-PO-fA- | | PO-mG-PO-fU-PO-mC-PO- | |
| | PO-fA-PO-mG-PO-mA-PO-mC- | | mU-PO-mU-PO-mG-PO-fA- | |
| | PO-mA-PO-mA-PO-mU-PO-mU- | | PO-mU-PO-fC-PO-mA-PO- | |
| | PO-mC-PS-mA-PS-mU-Hy | | mA-PO-mU-PS-mA-PS-mA- | |
| | | | Hy | |
| 165-c-08 | Hy-lgT7-PO-lgT7-PO-lgT7- | 972 | Hy-fA-PS-fU-PS-mG-PO- | 1134 |
| | PO-lA-PO-lU-PO-mU-PO-mG- | | fA-PO-mA-PO-fU-PO-mU- | |
| | PO-fA-PO-mU-PO-fC-PO-fA- | | PO-fG-PO-mU-PO-fC-PO- | |
| | PO-fA-PO-mG-PO-mA-PO-mC- | | mU-PO-mU-PO-mG-PO-fA- | |
| | PO-mA-PO-mA-PO-mU-PO-mU- | | PO-mU-PO-fC-PO-mA-PO- | |
| | PO-mC-PS-mA-PS-mU-Hy | | fA-PO-mU-PS-dT-PS-dT- | |
| | | | Hy | |
| 165-c-09 | Hy-lgT7-PO-lgT7-PO-lgT7- | 973 | Hy-mA-PS-fU-PS-mG-PO- | 1135 |
| | PO-mA-PO-mU-PO-mU-PO-mG- | | fA-PO-mA-PO-mU-PO-mU- | |
| | PO-fA-PO-mU-PO-fC-PO-mA- | | PO-mG-PO-mU-PO-mC-PO- | |
| | PO-fA-PO-fG-PO-fA-PO-mC- | | mU-PO-mU-PO-mG-PO-fA- | |
| | PO-mA-PO-mA-PO-mU-PO-mU- | | PO-mU-PO-fC-PO-mA-PO- | |
| | PO-mC-PS-mA-PS-mU-Hy | | mA-PO-mU-PS-mA-PS-mA- | |
| | | | Hy | |
| 165-c-10 | Hy-lgT7-PO-lgT7-PO-lgT7- | 974 | Hy-mA-PS-fU-PS-mG-PO- | 1136 |
| | PO-mA-PO-mU-PO-mU-PO-mG- | | mA-PO-mA-PO-fU-PO-mU- | |
| | PO-fA-PO-mU-PO-fC-PO-mA- | | PO-mG-PO-mU-PO-mC-PO- | |
| | PO-fA-PO-fG-PO-fA-PO-mC- | | mU-PO-mU-PO-mG-PO-fA- | |
| | PO-mA-PO-mA-PO-mU-PO-mU- | | PO-mU-PO-fC-PO-mA-PO- | |
| | PO-mC-PS-mA-PS-mU-Hy | | mA-PO-mU-PS-mA-PS-mA- | |
| | | | Hy | |
| 165-c-11 | Hy-lgT7-PO-lgT7-PO-lgT7- | 975 | Hy-mA-PS-fU-PS-mG-PO- | 1137 |
| | PO-mA-PO-mU-PO-mU-PO-mG- | | fA-PO-mA-PO-mU-PO-mU- | |
| | PO-fA-PO-mU-PO-fC-PO-mA- | | PO-fG-PO-mU-PO-mC-PO- | |
| | PO-fA-PO-fG-PO-fA-PO-mC- | | mU-PO-mU-PO-mG-PO-fA- | |
| | PO-mA-PO-mA-PO-mU-PO-mU- | | PO-mU-PO-fC-PO-mA-PO- | |
| | PO-mC-PS-mA-PS-mU-Hy | | mA-PO-mU-PS-mA-PS-mA- | |
| | | | Hy | |
| 165-c-12 | Hy-lgT7-PO-lgT7-PO-lgT7- | 976 | Hy-mA-PS-fU-PS-mG-PO- | 1138 |
| | PO-mA-PO-mU-PO-mU-PO-mG- | | mA-PO-mA-PO-mU-PO-mU- | |
| | PO-fA-PO-mU-PO-fC-PO-mA- | | PO-fG-PO-mU-PO-mC-PO- | |
| | PO-fA-PO-fG-PO-lA-PO-mC- | | mU-PO-mU-PO-mG-PO-fA- | |
| | PO-mA-PO-mA-PO-mU-PO-mU- | | PO-mU-PO-fC-PO-mA-PO- | |
| | PO-mC-PS-mA-PS-mU-Hy | | mA-PO-mU-PS-mA-PS-mA- | |
| | | | Hy | |
| 165-c-13 | Hy-lgT7-PO-lgT7-PO-lgT7- | 977 | Hy-fA-PS-fU-PS-mG-PO- | 1139 |
| | PO-mA-PO-mU-PO-mU-PO-mG- | | fA-PO-mA-PO-fU-PO-mU- | |
| | PO-fA-PO-mU-PO-fC-PO-mA- | | PO-fG-PO-mU-PO-mC-PO- | |
| | PO-fA-PO-fG-PO-fA-PO-mC- | | mU-PO-fU-PO-mG-PO-fA- | |
| | PO-mA-PO-mA-PO-mU-PO-mU- | | PO-mU-PO-fC-PO-mA-PO- | |
| | PO-mC-PS-mA-PS-mU-Hy | | fA-PO-mU-PS-dT-PS-dT- | |
| | | | Hy | |
| 165-c-14 | Hy-lgT7-PO-lgT7-PO-lgT7- | 978 | Hy-mA-PS-fU-PS-mG-PO- | 1140 |
| | PO-lA-PO-lU-PO-mU-PO-mG- | | fA-PO-mA-PO-mU-PO-mU- | |
| | PO-fA-PO-mU-PO-fC-PO-mA- | | PO-mG-PO-mU-PO-mC-PO- | |
| | PO-fA-PO-fG-PO-fA-PO-mC- | | mU-PO-mU-PO-mG-PO-fA- | |
| | PO-mA-PO-mA-PO-mU-PO-mU- | | PO-mU-PO-fC-PO-mA-PO- | |
| | PO-mC-PS-mA-PS-mU-Hy | | mA-PO-mU-PS-mA-PS-mA- | |
| | | | Hy | |
| 165-c-15 | Hy-lgT7-PO-lgT7-PO-lgT7- | 979 | Hy-mA-PS-fU-PS-mG-PO- | 1141 |
| | PO-lA-PO-lU-PO-mU-PO-mG- | | mA-PO-mA-PO-fU-PO-mU- | |
| | PO-fA-PO-mU-PO-fC-PO-mA- | | PO-mG-PO-mU-PO-mC-PO- | |
| | PO-fA-PO-fG-PO-lA-PO-mC- | | mU-PO-mU-PO-mG-PO-fA- | |
| | PO-mA-PO-mA-PO-mU-PO-mU- | | PO-mU-PO-fC-PO-mA-PO- | |
| | PO-mC-PS-mA-PS-mU-Hy | | mA-PO-mU-PS-mA-PS-mA- | |
| | | | Hy | |
| 165-c-16 | Hy-lgT7-PO-lgT7-PO-lgT7- | 980 | Hy-mA-PS-fU-PS-mG-PO- | 1142 |
| | PO-lA-PO-lU-PO-mU-PO-mG- | | fA-PO-mA-PO-mU-PO-mU- | |
| | PO-fA-PO-mU-PO-fC-PO-mA- | | PO-fG-PO-mU-PO-mC-PO- | |
| | PO-fA-PO-fG-PO-fA-PO-mC- | | mU-PO-mU-PO-mG-PO-fA- | |
| | PO-mA-PO-mA-PO-mU-PO-mU- | | PO-mU-PO-fC-PO-mA-PO- | |
| | PO-mC-PS-mA-PS-mU-Hy | | mA-PO-mU-PS-mA-PS-mA- | |
| | | | Hy | |
| 165-c-17 | Hy-lgT7-PO-lgT7-PO-lgT7- | 981 | Hy-mA-PS-fU-PS-mG-PO- | 1143 |
| | PO-lA-PO-lU-PO-mU-PO-mG- | | mA-PO-mA-PO-mU-PO-mU- | |
| | PO-fA-PO-mU-PO-fC-PO-mA- | | PO-fG-PO-mU-PO-mC-PO- | |
| | PO-fA-PO-fG-PO-fA-PO-mC- | | mU-PO-mU-PO-mG-PO-fA- | |
| | PO-mA-PO-mA-PO-mU-PO-mU- | | PO-mU-PO-fC-PO-mA-PO- | |
| | PO-mC-PS-mA-PS-mU-Hy | | mA-PO-mU-PS-mA-PS-mA- | |
| | | | Hy | |
| 165-c-18 | Hy-lgT7-PO-lgT7-PO-lgT7- | 982 | Hy-fA-PS-fU-PS-mG-PO- | 1144 |
| | PO-lA-PO-lU-PO-mU-PO-mG- | | fA-PO-mA-PO-fU-PO-mU- | |
| | PO-fA-PO-mU-PO-fC-PO-mA- | | PO-fG-PO-mU-PO-mC-PO- | |
| | PO-fA-PO-fG-PO-fA-PO-mC- | | mU-PO-fU-PO-mG-PO-fA- | |
| | PO-mA-PO-mA-PO-mU-PO-mU- | | PO-mU-PO-fC-PO-mA-PO- | |
| | PO-mC-PS-mA-PS-mU-Hy | | fA-PO-mU-PS-dT-PS-dT- | |
| | | | Hy | |
| 165-c-19 | Hy-lgT7-PO-lgT7-PO-lgT7- | 983 | Hy-mA-PS-fU-PS-mG-PO- | 1145 |
| | PO-mA-PO-mU-PO-mU-PO-mG- | | fA-PO-mA-PO-mU-PO-mU- | |
| | PO-fA-PO-mU-PO-fC-PO-fA- | | PO-mG-PO-mU-PO-mC-PO- | |
| | PO-fA-PO-mG-PO-mA-PO-mC- | | mU-PO-mU-PO-mG-PO-fA- | |
| | PO-mA-PO-mA-PO-mU-PO-mU- | | PO-mU-PO-fC-PO-mA-PO- | |
| | PO-mC-PO-lT4-PO-lT4-Hy | | mA-PO-mU-PS-mA-PS-mA- | |
| | | | Hy | |
| 165-c-20 | Hy-lgT7-PO-lgT7-PO-lgT7- | 984 | Hy-mA-PS-fU-PS-mG-PO- | 1146 |
| | PO-mA-PO-mU-PO-mU-PO-mG- | | mA-PO-mA-PO-fU-PO-mU- | |
| | PO-fA-PO-mU-PO-fC-PO-fA- | | PO-mG-PO-mU-PO-mC-PO- | |
| | PO-fA-PO-mG-PO-mA-PO-mC- | | mU-PO-mU-PO-mG-PO-fA- | |
| | PO-mA-PO-mA-PO-mU-PO-mU- | | PO-mU-PO-fC-PO-mA-PO- | |
| | PO-mC-PO-lT4-PO-lT4-Hy | | mA-PO-mU-PS-mA-PS-mA- | |
| | | | Hy | |
| 165-c-21 | Hy-lgT7-PO-lgT7-PO-lgT7- | 985 | Hy-mA-PS-fU-PS-mG-PO- | 1147 |
| | PO-mA-PO-mU-PO-mU-PO-mG- | | fA-PO-mA-PO-mU-PO-mU- | |
| | PO-fA-PO-mU-PO-fC-PO-fA- | | PO-mG-PO-fU-PO-mC-PO- | |
| | PO-fA-PO-mG-PO-mA-PO-mC- | | mU-PO-mU-PO-mG-PO-fA- | |
| | PO-mA-PO-mA-PO-mU-PO-mU- | | PO-mU-PO-fC-PO-mA-PO- | |
| | PO-mC-PO-lT4-PO-lT4-Hy | | mA-PO-mU-PS-mA-PS-mA- | |
| | | | Hy | |
| 165-c-22 | Hy-lgT7-PO-lgT7-PO-lgT7- | 986 | Hy-fA-PS-fU-PS-mG-PO- | 1148 |
| | PO-mA-PO-mU-PO-mU-PO-mG- | | fA-PO-mA-PO-fU-PO-mU- | |
| | PO-fA-PO-mU-PO-fC-PO-fA- | | PO-fG-PO-mU-PO-fC-PO- | |
| | PO-fA-PO-mG-PO-mA-PO-mC- | | mU-PO-mU-PO-mG-PO-fA- | |
| | PO-mA-PO-mA-PO-mU-PO-mU- | | PO-mU-PO-fC-PO-mA-PO- | |
| | PO-mC-PO-lT4-PO-lT4-Hy | | fA-PO-mU-PS-dT-PS-dT- | |
| | | | Hy | |
| 165-c-23 | Hy-lgT7-PO-lgT7-PO-lgT7- | 987 | Hy-mA-PS-fU-PS-mG-PO- | 1149 |
| | PO-lA-PO-lU-PO-mU-PO-mG- | | fA-PO-mA-PO-mU-PO-mU- | |
| | PO-fA-PO-mU-PO-fC-PO-fA- | | PO-mG-PO-mU-PO-mC-PO- | |
| | PO-fA-PO-mG-PO-mA-PO-mC- | | mU-PO-mU-PO-mG-PO-fA- | |
| | PO-mA-PO-mA-PO-mU-PO-mU- | | PO-mU-PO-fC-PO-mA-PO- | |
| | PO-mC-PO-lT4-PO-lT4-Hy | | mA-PO-mU-PS-mA-PS-mA- | |
| | | | Hy | |
| 165-c-24 | Hy-lgT7-PO-lgT7-PO-lgT7- | 988 | Hy-mA-PS-fU-PS-mG-PO- | 1150 |
| | PO-lA-PO-lU-PO-mU-PO-mG- | | mA-PO-mA-PO-fU-PO-mU- | |
| | PO-fA-PO-mU-PO-fC-PO-fA- | | PO-mG-PO-mU-PO-mC-PO- | |
| | PO-fA-PO-mG-PO-mA-PO-mC- | | mU-PO-mU-PO-mG-PO-fA- | |
| | PO-mA-PO-mA-PO-mU-PO-mU- | | PO-mU-PO-fC-PO-mA-PO- | |
| | PO-mC-PO-lT4-PO-lT4-Hy | | mA-PO-mU-PS-mA-PS-mA- | |
| | | | Hy | |
| 165-c-25 | Hy-lgT7-PO-lgT7-PO-lgT7- | 989 | Hy-mA-PS-fU-PS-mG-PO- | 1151 |
| | PO-lA-PO-lU-PO-mU-PO-mG- | | fA-PO-mA-PO-mU-PO-mU- | |
| | PO-fA-PO-mU-PO-fC-PO-fA- | | PO-mG-PO-fU-PO-mC-PO- | |
| | PO-fA-PO-mG-PO-mA-PO-mC- | | mU-PO-mU-PO-mG-PO-fA- | |
| | PO-mA-PO-mA-PO-mU-PO-mU- | | PO-mU-PO-fC-PO-mA-PO- | |
| | PO-mC-PO-lT4-PO-lT4-Hy | | mA-PO-mU-PS-mA-PS-mA- | |
| | | | Hy | |
| 165-c-26 | Hy-lgT7-PO-lgT7-PO-lgT7- | 990 | Hy-fA-PS-fU-PS-mG-PO- | 1152 |
| | PO-lA-PO-lU-PO-mU-PO-mG- | | fA-PO-mA-PO-fU-PO-mU- | |
| | PO-fA-PO-mU-PO-fC-PO-fA- | | PO-fG-PO-mU-PO-fC-PO- | |
| | PO-fA-PO-mG-PO-mA-PO-mC- | | mU-PO-mU-PO-mG-PO-fA- | |
| | PO-mA-PO-mA-PO-mU-PO-mU- | | PO-mU-PO-fC-PO-mA-PO- | |
| | PO-mC-PO-lT4-PO-lT4-Hy | | fA-PO-mU-PS-dT-PS-dT- | |
| | | | Hy | |
| 165-c-27 | Hy-lgT7-PO-lgT7-PO-lgT7- | 991 | Hy-mA-PS-fU-PS-mG-PO- | 1153 |
| | PO-mA-PO-mU-PO-mU-PO-mG- | | fA-PO-mA-PO-mU-PO-mU- | |
| | PO-fA-PO-mU-PO-fC-PO-mA- | | PO-mG-PO-mU-PO-mC-PO- | |
| | PO-fA-PO-fG-PO-fA-PO-mC- | | mU-PO-mU-PO-mG-PO-fA- | |
| | PO-mA-PO-mA-PO-mU-PO-mU- | | PO-mU-PO-fC-PO-mA-PO- | |
| | PO-mC-PO-lT4-PO-lT4-Hy | | mA-PO-mU-PS-mA-PS-mA- | |
| | | | Hy | |
| 165-c-28 | Hy-lgT7-PO-lgT7-PO-lgT7- | 992 | Hy-mA-PS-fU-PS-mG-PO- | 1154 |
| | PO-mA-PO-mU-PO-mU-PO-mG- | | mA-PO-mA-PO-fU-PO-mU- | |
| | PO-fA-PO-mU-PO-fC-PO-mA- | | PO-mG-PO-mU-PO-mC-PO- | |
| | PO-fA-PO-fG-PO-fA-PO-mC- | | mU-PO-mU-PO-mG-PO-fA- | |
| | PO-mA-PO-mA-PO-mU-PO-mU- | | PO-mU-PO-fC-PO-mA-PO- | |
| | PO-mC-PO-lT4-PO-lT4-Hy | | mA-PO-mU-PS-mA-PS-mA- | |
| | | | Hy | |
| 165-c-29 | Hy-lgT7-PO-lgT7-PO-lgT7- | 993 | Hy-mA-PS-fU-PS-mG-PO- | 1155 |
| | PO-mA-PO-mU-PO-mU-PO-mG- | | fA-PO-mA-PO-mU-PO-mU- | |
| | PO-fA-PO-mU-PO-fC-PO-mA- | | PO-fG-PO-mU-PO-mC-PO- | |
| | PO-fA-PO-fG-PO-fA-PO-mC- | | mU-PO-mU-PO-mG-PO-fA- | |
| | PO-mA-PO-mA-PO-mU-PO-mU- | | PO-mU-PO-fC-PO-mA-PO- | |
| | PO-mC-PO-lT4-PO-lT4-Hy | | mA-PO-mU-PS-mA-PS-mA- | |
| | | | Hy | |
| 165-c-30 | Hy-lgT7-PO-lgT7-PO-lgT7- | 994 | Hy-mA-PS-fU-PS-mG-PO- | 1156 |
| | PO-mA-PO-mU-PO-mU-PO-mG- | | mA-PO-mA-PO-mU-PO-mU- | |
| | PO-fA-PO-mU-PO-fC-PO-mA- | | PO-fG-PO-mU-PO-mC-PO- | |
| | PO-fA-PO-fG-PO-fA-PO-mC- | | mU-PO-mU-PO-mG-PO-fA- | |
| | PO-mA-PO-mA-PO-mU-PO-mU- | | PO-mU-PO-fC-PO-mA-PO- | |
| | PO-mC-PO-lT4-PO-lT4-Hy | | mA-PO-mU-PS-mA-PS-mA- | |
| | | | Hy | |
| 165-c-31 | Hy-lgT7-PO-lgT7-PO-lgT7- | 995 | Hy-fA-PS-fU-PS-mG-PO- | 1157 |
| | PO-mA-PO-mU-PO-mU-PO-mG- | | fA-PO-mA-PO-fU-PO-mU- | |
| | PO-fA-PO-mU-PO-fC-PO-mA- | | PO-fG-PO-mU-PO-mC-PO- | |
| | PO-fA-PO-fG-PO-fA-PO-mC- | | mU-PO-fU-PO-mG-PO-fA- | |
| | PO-mA-PO-mA-PO-mU-PO-mU- | | PO-mU-PO-fC-PO-mA-PO- | |
| | PO-mC-PO-lT4-PO-lT4-Hy | | fA-PO-mU-PS-dT-PS-dT- | |
| | | | Hy | |
| 165-c-32 | Hy-lgT7-PO-lgT7-PO-lgT7- | 996 | Hy-mA-PS-fU-PS-mG-PO- | 1158 |
| | PO-lA-PO-lU-PO-mU-PO-mG- | | fA-PO-mA-PO-mU-PO-mU- | |
| | PO-fA-PO-mU-PO-fC-PO-mA- | | PO-mG-PO-mU-PO-mC-PO- | |
| | PO-fA-PO-fG-PO-fA-PO-mC- | | mU-PO-mU-PO-mG-PO-fA- | |
| | PO-mA-PO-mA-PO-mU-PO-mU- | | PO-mU-PO-fC-PO-mA-PO- | |
| | PO-mC-PO-lT4-PO-lT4-Hy | | mA-PO-mU-PS-mA-PS-mA- | |
| | | | Hy | |
| 165-c-33 | Hy-lgT7-PO-lgT7-PO-lgT7- | 997 | Hy-mA-PS-fU-PS-mG-PO- | 1159 |
| | PO-lA-PO-lU-PO-mU-PO-mG- | | mA-PO-mA-PO-fU-PO-mU- | |
| | PO-fA-PO-mU-PO-fC-PO-mA- | | PO-mG-PO-mU-PO-mC-PO- | |
| | PO-fA-PO-fG-PO-fA-PO-mC- | | mU-PO-mU-PO-mG-PO-fA- | |
| | PO-mA-PO-mA-PO-mU-PO-mU- | | PO-mU-PO-fC-PO-mA-PO- | |
| | PO-mC-PO-lT4-PO-lT4-Hy | | mA-PO-mU-PS-mA-PS-mA- | |
| | | | Hy | |
| 165-c-34 | Hy-lgT7-PO-lgT7-PO-lgT7- | 998 | Hy-mA-PS-fU-PS-mG-PO- | 1160 |
| | PO-lA-PO-lU-PO-mU-PO-mG- | | fA-PO-mA-PO-mU-PO-mU- | |
| | PO-fA-PO-mU-PO-fC-PO-mA- | | PO-fG-PO-mU-PO-mC-PO- | |
| | PO-fA-PO-fG-PO-lA-PO-mC- | | mU-PO-mU-PO-mG-PO-fA- | |
| | PO-mA-PO-mA-PO-mU-PO-mU- | | PO-mU-PO-fC-PO-mA-PO- | |
| | PO-mC-PO-lT4-PO-lT4-Hy | | mA-PO-mU-PS-mA-PS-mA- | |
| | | | Hy | |
| 165-c-35 | Hy-lgT7-PO-lgT7-PO-lgT7- | 999 | Hy-mA-PS-fU-PS-mG-PO- | 1161 |
| | PO-lA-PO-lU-PO-mU-PO-mG- | | mA-PO-mA-PO-mU-PO-mU- | |
| | PO-fA-PO-mU-PO-fC-PO-mA- | | PO-fG-PO-mU-PO-mC-PO- | |
| | PO-fA-PO-fG-PO-fA-PO-mC- | | mU-PO-mU-PO-mG-PO-fA- | |
| | PO-mA-PO-mA-PO-mU-PO-mU- | | PO-mU-PO-fC-PO-mA-PO- | |
| | PO-mC-PO-lT4-PO-lT4-Hy | | mA-PO-mU-PS-mA-PS-mA- | |
| | | | Hy | |
| 165-c-36 | Hy-lgT7-PO-lgT7-PO-lgT7- | 1000 | Hy-fA-PS-fU-PS-mG-PO- | 1162 |
| | PO-lA-PO-lU-PO-mU-PO-mG- | | fA-PO-mA-PO-fU-PO-mU- | |
| | PO-fA-PO-mU-PO-fC-PO-mA- | | PO-fG-PO-mU-PO-mC-PO- | |
| | PO-fA-PO-fG-PO-fA-PO-mC- | | mU-PO-fU-PO-mG-PO-fA- | |
| | PO-mA-PO-mA-PO-mU-PO-mU- | | PO-mU-PO-fC-PO-mA-PO- | |
| | PO-mC-PO-lT4-PO-lT4-Hy | | fA-PO-mU-PS-dT-PS-dT- | |
| 165-c-37 | Hy-lgT7-PO-lgT7-PO-lgT7- | 1001 | Hy-mA-PS-fU-PS-mG-PO- | 1163 |
| | PO-mA-PO-mU-PO-mU-PO-mG- | | fA-PO-mA-PO-mU-PO-mU- | |
| | PO-fA-PO-mU-PO-fC-PO-fA- | | PO-mG-PO-mU-PO-mC-PO- | |
| | PO-fA-PO-mG-PO-mA-PO-mC- | | mU-PO-mU-PO-mG-PO-fA- | |
| | PO-mA-PO-mA-PO-mU-PO-mU- | | PO-mU-PO-fC-PO-mA-PO- | |
| | PO-mC-PO-mA-PO-mU-PO-lT4- | | mA-PO-mU-PS-mA-PS-mA- | |
| | PO-lT4-Hy | | Hy | |
| 165-c-38 | Hy-lgT7-PO-lgT7-PO-lgT7- | 1002 | Hy-mA-PS-fU-PS-mG-PO- | 1164 |
| | PO-mA-PO-mU-PO-mU-PO-mG- | | mA-PO-mA-PO-fU-PO-mU- | |
| | PO-fA-PO-mU-PO-fC-PO-fA- | | PO-mG-PO-mU-PO-mC-PO- | |
| | PO-fA-PO-mG-PO-mA-PO-mC- | | mU-PO-mU-PO-mG-PO-fA- | |
| | PO-mA-PO-mA-PO-mU-PO-mU- | | PO-mU-PO-fC-PO-mA-PO- | |
| | PO-mC-PO-mA-PO-mU-PO-lT4- | | mA-PO-mU-PS-mA-PS-mA- | |
| | PO-lT4-Hy | | Hy | |
| 165-c-39 | Hy-lgT7-PO-lgT7-PO-lgT7- | 1003 | Hy-mA-PS-fU-PS-mG-PO- | 1165 |
| | PO-mA-PO-mU-PO-mU-PO-mG- | | fA-PO-mA-PO-mU-PO-mU- | |
| | PO-fA-PO-mU-PO-fC-PO-fA- | | PO-mG-PO-fU-PO-mC-PO- | |
| | PO-fA-PO-mG-PO-mA-PO-mC- | | mU-PO-mU-PO-mG-PO-fA- | |
| | PO-mA-PO-mA-PO-mU-PO-mU- | | PO-mU-PO-fC-PO-mA-PO- | |
| | PO-mC-PO-mA-PO-mU-PO-lT4- | | mA-PO-mU-PS-mA-PS-mA- | |
| | PO-lT4-Hy | | Hy | |
| 165-c-40 | Hy-lgT7-PO-lgT7-PO-lgT7- | 1004 | Hy-fA-PS-fU-PS-mG-PO- | 1166 |
| | PO-mA-PO-mU-PO-mU-PO-mG- | | fA-PO-mA-PO-fU-PO-mU- | |
| | PO-fA-PO-mU-PO-fC-PO-fA- | | PO-fG-PO-mU-PO-fC-PO- | |
| | PO-fA-PO-mG-PO-mA-PO-mC- | | mU-PO-mU-PO-mG-PO-fA- | |
| | PO-mA-PO-mA-PO-mU-PO-mU- | | PO-mU-PO-fC-PO-mA-PO- | |
| | PO-mC-PO-mA-PO-mU-PO-lT4- | | fA-PO-mU-PS-dT-PS-dT- | |
| | PO-lT4-Hy | | Hy | |
| 165-c-41 | Hy-lgT7-PO-lgT7-PO-lgT7- | 1005 | Hy-mA-PS-fU-PS-mG-PO- | 1167 |
| | PO-lA-PO-lU-PO-mU-PO-mG- | | fA-PO-mA-PO-mU-PO-mU- | |
| | PO-fA-PO-mU-PO-fC-PO-fA- | | PO-mG-PO-mU-PO-mC-PO- | |
| | PO-fA-PO-mG-PO-mA-PO-mC- | | mU-PO-mU-PO-mG-PO-fA- | |
| | PO-mA-PO-mA-PO-mU-PO-mU- | | PO-mU-PO-fC-PO-mA-PO- | |
| | PO-mC-PO-mA-PO-mU-PO-lT4- | | mA-PO-mU-PS-mA-PS-mA- | |
| | PO-lT4-Hy | | Hy | |
| 165-c-42 | Hy-lgT7-PO-lgT7-PO-lgT7- | 1006 | Hy-mA-PS-fU-PS-mG-PO- | 1168 |
| | PO-lA-PO-lU-PO-mU-PO-mG- | | mA-PO-mA-PO-fU-PO-mU- | |
| | PO-fA-PO-mU-PO-fC-PO-fA- | | PO-mG-PO-mU-PO-mC-PO- | |
| | PO-fA-PO-mG-PO-mA-PO-mC- | | mU-PO-mU-PO-mG-PO-fA- | |
| | PO-mA-PO-mA-PO-mU-PO-mU- | | PO-mU-PO-fC-PO-mA-PO- | |
| | PO-mC-PO-mA-PO-mU-PO-lT4- | | mA-PO-mU-PS-mA-PS-mA- | |
| | PO-lT4-Hy | | Hy | |
| 165-c-43 | Hy-lgT7-PO-lgT7-PO-lgT7- | 1007 | Hy-mA-PS-fU-PS-mG-PO- | 1169 |
| | PO-lA-PO-lU-PO-mU-PO-mG- | | fA-PO-mA-PO-mU-PO-mU- | |
| | PO-fA-PO-mU-PO-fC-PO-fA- | | PO-mG-PO-fU-PO-mC-PO- | |
| | PO-fA-PO-mG-PO-mA-PO-mC- | | mU-PO-mU-PO-mG-PO-fA- | |
| | PO-mA-PO-mA-PO-mU-PO-mU- | | PO-mU-PO-fC-PO-mA-PO- | |
| | PO-mC-PO-mA-PO-mU-PO-lT4- | | mA-PO-mU-PS-mA-PS-mA- | |
| | PO-lT4-Hy | | | |
| 165-c-44 | Hy-lgT7-PO-lgT7-PO-lgT7- | 1008 | Hy-fA-PS-fU-PS-mG-PO- | 1170 |
| | PO-lA-PO-lU-PO-mU-PO-mG- | | fA-PO-mA-PO-fU-PO-mU- | |
| | PO-lA-PO-mU-PO-fC-PO-fA- | | PO-fG-PO-mU-PO-fC-PO- | |
| | PO-fA-PO-mG-PO-mA-PO-mC- | | mU-PO-mU-PO-mG-PO-fA- | |
| | PO-mA-PO-mA-PO-mU-PO-mU- | | PO-mU-PO-fC-PO-mA-PO- | |
| | PO-mC-PO-mA-PO-mU-PO-lT4- | | fA-PO-mU-PS-dT-PS-dT- | |
| | PO-lT4-Hy | | Hy | |
| 165-c-45 | Hy-lgT7-PO-lgT7-PO-lgT7- | 1009 | Hy-mA-PS-fU-PS-mG-PO- | 1171 |
| | PO-mA-PO-mU-PO-mU-PO-mG- | | fA-PO-mA-PO-mU-PO-mU- | |
| | PO-fA-PO-mU-PO-fC-PO-mA- | | PO-mG-PO-mU-PO-mC-PO- | |
| | PO-fA-PO-fG-PO-fA-PO-mC- | | mU-PO-mU-PO-mG-PO-fA- | |
| | PO-mA-PO-mA-PO-mU-PO-mU- | | PO-mU-PO-fC-PO-mA-PO- | |
| | PO-mC-PO-mA-PO-mU-PO-lT4- | | mA-PO-mU-PS-mA-PS-mA- | |
| | PO-lT4-Hy | | Hy | |
| 165-c-46 | Hy-lgT7-PO-lgT7-PO-lgT7- | 1010 | Hy-mA-PS-fU-PS-mG-PO- | 1172 |
| | PO-mA-PO-mU-PO-mU-PO-mG- | | mA-PO-mA-PO-fU-PO-mU- | |
| | PO-fA-PO-mU-PO-fC-PO-mA- | | PO-mG-PO-mU-PO-mC-PO- | |
| | PO-fA-PO-fG-PO-fA-PO-mC- | | mU-PO-mU-PO-mG-PO-fA- | |
| | PO-mA-PO-mA-PO-mU-PO-mU- | | PO-mU-PO-fC-PO-mA-PO- | |
| | PO-mC-PO-mA-PO-mU-PO-lT4- | | mA-PO-mU-PS-mA-PS-mA- | |
| | PO-lT4-Hy | | Hy | |
| 165-c-47 | Hy-lgT7-PO-lgT7-PO-lgT7- | 1011 | Hy-mA-PS-fU-PS-mG-PO- | 1173 |
| | PO-mA-PO-mU-PO-mU-PO-mG- | | fA-PO-mA-PO-mU-PO-mU- | |
| | PO-fA-PO-mU-PO-fC-PO-mA- | | PO-fG-PO-mU-PO-mC-PO- | |
| | PO-fA-PO-fG-PO-fA-PO-mC- | | mU-PO-mU-PO-mG-PO-fA- | |
| | PO-mA-PO-mA-PO-mU-PO-mU- | | PO-mU-PO-fC-PO-mA-PO- | |
| | PO-mC-PO-mA-PO-mU-PO-lT4- | | mA-PO-mU-PS-mA-PS-mA- | |
| | PO-lT4-Hy | | Hy | |
| 165-c-48 | Hy-lgT7-PO-lgT7-PO-lgT7- | 1012 | Hy-mA-PS-fU-PS-mG-PO- | 1174 |
| | PO-mA-PO-mU-PO-mU-PO-mG- | | mA-PO-mA-PO-mU-PO-mU- | |
| | PO-fA-PO-mU-PO-fC-PO-mA- | | PO-fG-PO-mU-PO-mC-PO- | |
| | PO-fA-PO-fG-PO-lA-PO-mC- | | mU-PO-mU-PO-mG-PO-fA- | |
| | PO-mA-PO-mA-PO-mU-PO-mU- | | PO-mU-PO-fC-PO-mA-PO- | |
| | PO-mC-PO-mA-PO-mU-PO-lT4- | | mA-PO-mU-PS-mA-PS-mA- | |
| | PO-lT4-Hy | | | |
| 165-c-49 | Hy-lgT7-PO-lgT7-PO-lgT7- | 1013 | Hy-fA-PS-fU-PS-mG-PO- | 1175 |
| | PO-mA-PO-mU-PO-mU-PO-mG- | | fA-PO-mA-PO-fU-PO-mU- | |
| | PO-fA-PO-mU-PO-fC-PO-mA- | | PO-fG-PO-mU-PO-mC-PO- | |
| | PO-fA-PO-fG-PO-fA-PO-mC- | | mU-PO-fU-PO-mG-PO-fA- | |
| | PO-mA-PO-mA-PO-mU-PO-mU- | | PO-mU-PO-fC-PO-mA-PO- | |
| | PO-mC-PO-mA-PO-mU-PO-lT4- | | fA-PO-mU-PS-dT-PS-dT- | |
| | PO-lT4-Hy | | Hy | |
| 165-c-50 | Hy-lgT7-PO-lgT7-PO-lgT7- | 1014 | Hy-mA-PS-fU-PS-mG-PO- | 1176 |
| | PO-lA-PO-lU-PO-mU-PO-mG- | | fA-PO-mA-PO-mU-PO-mU- | |
| | PO-fA-PO-mU-PO-fC-PO-mA- | | PO-mG-PO-mU-PO-mC-PO- | |
| | PO-fA-PO-fG-PO-lA-PO-mC- | | mU-PO-mU-PO-mG-PO-fA- | |
| | PO-mA-PO-mA-PO-mU-PO-mU- | | PO-mU-PO-fC-PO-mA-PO- | |
| | PO-mC-PO-mA-PO-mU-PO-lT4- | | mA-PO-mU-PS-mA-PS-mA- | |
| | PO-lT4-Hy | | Hy | |
| 165-c-51 | Hy-lgT7-PO-lgT7-PO-lgT7- | 1015 | Hy-mA-PS-fU-PS-mG-PO- | 1177 |
| | PO-lA-PO-lU-PO-mU-PO-mG- | | mA-PO-mA-PO-fU-PO-mU- | |
| | PO-fA-PO-mU-PO-fC-PO-mA- | | PO-mG-PO-mU-PO-mC-PO- | |
| | PO-fA-PO-fG-PO-fA-PO-mC- | | mU-PO-mU-PO-mG-PO-fA- | |
| | PO-mA-PO-mA-PO-mU-PO-mU- | | PO-mU-PO-fC-PO-mA-PO- | |
| | PO-mC-PO-mA-PO-mU-PO-lT4- | | mA-PO-mU-PS-mA-PS-mA- | |
| | PO-lT4-Hy | | Hy | |
| 165-c-52 | Hy-lgT7-PO-lgT7-PO-lgT7- | 1016 | Hy-mA-PS-fU-PS-mG-PO- | 1178 |
| | PO-lA-PO-lU-PO-mU-PO-mG- | | fA-PO-mA-PO-mU-PO-mU- | |
| | PO-fA-PO-mU-PO-fC-PO-mA- | | PO-fG-PO-mU-PO-mC-PO- | |
| | PO-fA-PO-fG-PO-fA-PO-mC- | | mU-PO-mU-PO-mG-PO-fA- | |
| | PO-mA-PO-mA-PO-mU-PO-mU- | | PO-mU-PO-fC-PO-mA-PO- | |
| | PO-mC-PO-mA-PO-mU-PO-lT4- | | mA-PO-mU-PS-mA-PS-mA- | |
| | PO-lT4-Hy | | Hy | |
| 165-c-53 | Hy-lgT7-PO-lgT7-PO-lgT7- | 1017 | Hy-mA-PS-fU-PS-mG-PO- | 1179 |
| | PO-lA-PO-lU-PO-mU-PO-mG- | | mA-PO-mA-PO-mU-PO-mU- | |
| | PO-fA-PO-mU-PO-fC-PO-mA- | | PO-fG-PO-mU-PO-mC-PO- | |
| | PO-fA-PO-fG-PO-fA-PO-mC- | | mU-PO-mU-PO-mG-PO-fA- | |
| | PO-mA-PO-mA-PO-mU-PO-mU- | | PO-mU-PO-fC-PO-mA-PO- | |
| | PO-mC-PO-mA-PO-mU-PO-lT4- | | mA-PO-mU-PS-mA-PS-mA- | |
| | PO-lT4-Hy | | Hy | |
| 165-c-54 | Hy-lgT7-PO-lgT7-PO-lgT7- | 1018 | Hy-fA-PS-fU-PS-mG-PO- | 1180 |
| | PO-lA-PO-lU-PO-mU-PO-mG- | | fA-PO-mA-PO-fU-PO-mU- | |
| | PO-fA-PO-mU-PO-fC-PO-mA- | | PO-fG-PO-mU-PO-mC-PO- | |
| | PO-fA-PO-fG-PO-fA-PO-mC- | | mU-PO-fU-PO-mG-PO-fA- | |
| | PO-mA-PO-mA-PO-mU-PO-mU- | | PO-mU-PO-fC-PO-mA-PO- | |
| | PO-mC-PO-mA-PO-mU-PO-lT4- | | fA-PO-mU-PS-dT-PS-dT- | |
| | PO-lT4-Hy | | Hy | |

[0199] While the exemplary siRNAs shown in Tables 2 and 3 include nucleotide modifications, siRNAs having the same or substantially the same sequences but different numbers, patterns, and/or types of modifications, are also contemplated.

[0200] In some embodiments, a dsRNA comprises a sense strand shown in Table 1 with the addition of nucleotides (or modified versions thereof) at either or both of its termini. For example, the dsRNA comprises a sense strand shown in Table 1 with the addition of a 5′ CCA and/or a 3′ invdT. In some embodiments, a dsRNA comprises an antisense strand shown in Table 1 with the addition of nucleotides (or modified versions thereof) at either or both of its termini. For example, the dsRNA comprises an antisense strand shown in Table 1 with the addition of a 3′ dTdT. In certain embodiments, a dsRNA comprises a pair of sense and antisense strands as shown in Table 1, with the addition of a 5′ CCA and a 3′ invdT to the sense strand and with the addition of a 3′ dTdT to the antisense strand. In certain embodiments, a dsRNA comprises a pair of sense and antisense strands as shown in Table 2, with the addition of a 5′ lgT7-lgT7-lgT7 and a 3′ lT4-lT4 to the sense strand.

[0201] In some embodiments, a dsRNA of the present disclosure comprises a sense sequence that is at least 70%, 75%, 80%, 85%, 90%, 95%, 96%, 97%, 98%, or 99% identical in sequence to a sense sequence shown in Table 1. In some embodiments, a dsRNA of the present disclosure comprises an antisense sequence that is at least 70%, 75%, 80%, 85%, 90%, 95%, 96%, 97%, 98%, or 99% identical in sequence to an antisense sequence shown in Table 1. In some embodiments, a dsRNA of the present disclosure comprises sense and antisense sequences that are at least 70%, 75%, 80%, 85%, 90%, 95%, 96%, 97%, 98%, or 99% identical in sequence to sense and antisense sequences, respectively, shown in Table 1. In certain embodiments, the dsRNA comprises sense and antisense strands having the sequences shown in Table 2. In certain embodiments, the dsRNA comprises sense and antisense strands having the sequences shown in Table 3.

[0202] The “percentage identity” between two nucleotide sequences is determined by comparing the two optimally-aligned sequences in which the nucleic acid sequence to compare can have additions or deletions compared to the reference sequence for optimal alignment between the two sequences. “Percentage identity” is calculated by determining the number of positions at which the nucleotide residue is identical between the two sequences, preferably between the two complete sequences, dividing the number of identical positions by the total number of positions in the alignment window and multiplying the result by 100 to obtain the percentage identity between the two sequences. For purposes herein, when determining “percentage identity” between two nucleotide sequences, modifications to the nucleotides are not considered. For example, a sequence of 5′-mC-fU-mA-fG-3′ is considered having 100% sequence identity as a sequence of 5′-CUAG-3′.

I.5 dsRNA Conjugates

[0203] The present dsRNAs may be covalently or noncovalently linked to one or more ligands or moieties. Examples of such ligands and moieties may be found, e.g., in Jeong et al., Bioconjugate Chem. (2009) 20:5-14 and Sebestydn et al., Methods Mol Biol. (2015) 1218:163-86. In some embodiments, the dsRNA is conjugated/attached to one or more ligands via a linker. Any linker known in the art may be used, including, for example, multivalent (e.g., bivalent, trivalent, or tetravalent) branched linkers. The linker may be cleavable or non-cleavable. Conjugating a ligand to a dsRNA may alter its distribution, enhance its cellular absorption and/or targeting to a particular tissue and/or uptake by one or more specific cell types (e.g., liver cells), and/or enhance the lifetime or half-life of the dsRNA. In some embodiments, a hydrophobic ligand is conjugated to the dsRNA to facilitate direct permeation of the cellular membrane and/or uptake across cells (e.g., liver cells). For ANGPTL3-targeting dsRNAs (e.g., siRNAs), the target tissue may be the liver, including parenchymal cells of the liver (e.g., hepatocytes).

[0204] In some embodiments, the dsRNA of the present disclosure is conjugated to a cell-targeting ligand. A cell-targeting ligand refers to a molecular moiety that facilitates delivery of the dsRNA to the target cell, which encompasses (i) increased specificity of the dsRNA to bind to cells expressing the selected target receptors (e.g., target proteins); (ii) increased uptake of the dsRNA by the target cells; and (iii) increased ability of the dsRNA to be appropriately processed once it has entered into a target cell, such as increased intracellular release of an siRNA, e.g., by facilitating the translocation of the siRNA from transport vesicles into the cytoplasm. The ligand may be, for example, a protein (e.g., a glycoprotein), a peptide, a lipid, a carbohydrate, or a molecule having a specific affinity for a co-ligand.

[0205] Specific examples of ligands include, without limitation, an antibody or antigen-binding fragment thereof that binds to a specific receptor on a liver cell, thyrotropin, melanotropin, surfactant protein A, mucin carbohydrate, multivalent lactose, multivalent galactose, multivalent mannose, multivalent fucose, N-acetylgalactosamine, N-acetylglucosamine, transferrin, bisphosphonate, a steroid, bile acid, lipopolysaccharide, a recombinant or synthetic molecule such as a synthetic polymer, polyamino acids, an alpha helical peptide, polyglutamate, polyaspartate, lectins, and cofactors. In some embodiments, the ligand is one or more dyes, crosslinkers, polycyclic aromatic hydrocarbons, peptide conjugates (e.g., antennapedia peptide, Tat peptide), polyethylene glycol (PEG), enzymes, haptens, transport/absorption facilitators, synthetic ribonucleases (e.g., imidazole, bisimidazole, histamine, or imidazole clusters), human serum albumin (HSA), or LDL.

[0206] In some embodiments, the dsRNA is conjugated to one or more cholesterol derivatives or lipophilic moieties such as cholesterol or a cholesterol derivative; cholic acid; a vitamin (such as folate, vitamin A, vitamin E (tocopherol), biotin, or pyridoxal); bile or fatty acid conjugates, including both saturated and non-saturated (such as lauroyl (C12), myristoyl (C14), palmitoyl (C16), stearoyl (C18) and docosanyl (C22), lithocholic acid and/or lithocholic acid oleylamine conjugate (lithocholic-oleyl, C43)); polymeric backbones or scaffolds (such as PEG, triethylene glycol (TEG), hexaethylene glycol (HEG), poly(lactic-co-glycolic acid) (PLGA), poly(lactide-co-glycolide) (PLG), hydrodynamic polymers); steroids (such as dihydrotestosterone); terpene (such as triterpene); cationic lipids or peptides; and/or a lipid or lipid-based molecule. Such a lipid or lipid-based molecule may bind a serum protein, e.g., human serum albumin (HSA). A lipid-based ligand may be used to modulate (e.g., control) the binding of the conjugate to a target tissue. For example, a lipid or lipid-based ligand that binds to HSA more strongly will be less likely to be targeted to the kidney and therefore less likely to be cleared from the body.

[0207] In some embodiments, the cell-targeting moiety or ligand is a N-acetylgalactosamine (GalNAc) derivative. In some embodiments, the dsRNA is attached to one or more (e.g., two, three, four, or more) GalNAc derivatives. The attachment may be via one or more linkers (e.g., two, three, four, or more linkers). In some embodiments, a linker described herein is a multivalent (e.g., bivalent, trivalent, or tetravalent) branched linker. In some embodiments, the dsRNA is attached to two or more GalNAc derivatives via a bivalent branched linker. In some embodiments, the dsRNA is attached to three or more GalNAc derivatives via a trivalent branched linker. In some embodiments, the dsRNA is attached to three or more GalNAc derivatives with or without linkers. In some embodiments, the dsRNA is attached to four or more GalNAc derivatives via four separate linkers. In some embodiments, the dsRNA is attached to four or more GalNAc derivatives via a tetravalent branched linker. In some embodiments, the one or more GalNAc derivatives is attached to the 3′-end of the sense strand, the 3′-end of the antisense strand, the 5′-end of the sense strand, and/or the 5′-end of the antisense strand of the dsRNA. Exemplary and non-limiting conjugates and linkers are described, e.g., in Biessen et al., Bioconjugate Chem. (2002) 13(2):295-302; Cedillo et al., Molecules (2017) 22(8):E1356; Grijalvo et al., Genes (2018) 9(2):E74; Huang et al., Molecular Therapy: Nucleic Acids (2017) 6:116-32; Nair et al., J Am Chem Soc. (2014) 136:16958-61; Ostergaard et al., Bioconjugate Chem. (2015) 26:1451-5; Springer et al., Nucleic Acid Therapeutics (2018) 28(3):109-18; and U.S. Pat. Nos. 8,106,022, 9,127,276, and 8,927,705. GalNAc conjugation can be readily performed by methods well known in the art (e.g., as described in the above documents)

II. Methods of Making dsRNAs

[0208] A dsRNA of the present disclosure may be synthesized by any method known in the art. For example, a dsRNA may be synthesized by use of an automated synthesizer, by in vitro transcription and purification (e.g., using commercially available in vitro RNA synthesis kits), by transcription and purification from cells (e.g., cells comprising an expression cassette/vector encoding the dsRNA), and the like. In some embodiments, the sense and antisense strands of the dsRNA are synthesized separately and then annealed to form the dsRNA. In some embodiments, the dsRNA comprising modified nucleotides of formula (I) optionally conjugated to a cell targeting moiety (e.g., GalNAc) may be prepared according to the disclosure of PCT Publication WO 2019/170731.

[0209] Ligand-conjugated dsRNAs and ligand molecules bearing sequence-specific linked nucleosides of the present disclosure may be assembled by any method known in the art, including, for example, assembly on a suitable polynucleotide synthesizer utilizing standard nucleotide or nucleoside precursors, or nucleotide or nucleoside conjugate precursors that already bear the linking moiety, ligand-nucleotide, or nucleoside-conjugated precursors that already bear the ligand molecule, or non-nucleoside ligand-bearing building blocks.

[0210] Ligand-conjugated dsRNAs of the present disclosure may be synthesized by any method known in the art, including, for example, by the use of a dsRNA bearing a pendant reactive functionality such as that derived from the attachment of a linking molecule onto the dsRNA. In some embodiments, this reactive oligonucleotide may be reacted directly with commercially-available ligands, ligands that are synthesized bearing any of a variety of protecting groups, or ligands that have a linking moiety attached thereto. In some embodiments, the methods facilitate the synthesis of ligand-conjugated dsRNA by the use of nucleoside monomers that have been appropriately conjugated with ligands and that may further be attached to a solid support material. In some embodiments, a dsRNA bearing an aralkyl ligand attached to the 3′-end of the dsRNA is prepared by first covalently attaching a monomer building block to a controlled-pore-glass support via a long-chain aminoalkyl group; then, nucleotides are bonded via standard solid-phase synthesis techniques to the monomer building-block bound to the solid support. The monomer building-block may be a nucleoside or other organic compound that is compatible with solid-phase synthesis.

[0211] In some embodiments, functionalized nucleoside sequences of the present disclosure possessing an amino group at the 5′-terminus are prepared using a polynucleotide synthesizer, and then reacted with an active ester derivative of a selected ligand. Active ester derivatives are well known to one of ordinary skill in the art. The reaction of the amino group and the active ester produces an oligonucleotide in which the selected ligand is attached to the 5′-position through a linking group. The amino group at the 5′-terminus can be prepared utilizing a 5′-amino-modifier C6 reagent. In some embodiments, ligand molecules are conjugated to oligonucleotides at the 5′-position by the use of a ligand-nucleoside phosphoramidite wherein the ligand is linked to the 5′-hydroxy group directly or indirectly via a linker. Such ligand-nucleoside phosphoramidites are typically used at the end of an automated synthesis procedure to provide a ligand-conjugated oligonucleotide bearing the ligand at the 5′-terminus.

[0212] In some embodiments, click chemistry is used to synthesize siRNA conjugates. See, e.g., Astakhova et al., Mol Pharm. (2018) 15(8):2892-9; Mercier et al., Bioconjugate Chem. (2011) 22(1):108-14.

III. Compositions and Delivery of dsRNAs

[0213] Certain aspects of the present disclosure relate to compositions (e.g., pharmaceutical compositions) comprising a dsRNA as described herein. In some embodiments, the composition further comprises a pharmaceutically acceptable excipient. In some embodiments, the composition is useful for treating patient having or at risk of having a disease or disorder associated with the expression or activity of the ANGPTL3 gene. In some embodiments, the disease or disorder associated with the expression of the ANGPTL3 gene is a lipid metabolism disorder (e.g., hypertriglyceridemia and hyperlipidemia (such as familial combined hyperlipidemia, familial hypercholesterolemia (e.g., HoFH), and polygenic hypercholesterolemia) and conditions and diseases associated with elevated TGs and/or LDL-c (e.g., atherosclerosis, arteriosclerosis, heart disease, heart attack, stroke, and pancreatitis), and/or any other associated condition and disease described herein and in the art. Compositions of the present disclosure may be formulated based upon the mode of delivery, including, for example, compositions formulated for delivery to the liver via parenteral administration.

[0214] The present dsRNAs can be formulated with a pharmaceutically acceptable excipient. Pharmaceutically acceptable excipients can be liquid or solid, and may be selected with the planned manner of administration in mind so as to provide for the desired bulk, consistency, and other pertinent transport and chemical properties. Any known pharmaceutically acceptable excipient may be used, including, for example, water, saline solution, binding agents (e.g., polyvinylpyrrolidone or hydroxypropyl methylcellulose), fillers (e.g., lactose and other sugars, gelatin, or calcium sulfate), lubricants (e.g., starch, polyethylene glycol, or sodium acetate), disintegrates (e.g., starch or sodium starch glycolate), calcium salts (e.g., calcium sulfate, calcium chloride, calcium phosphate, and hydroxyapatite), and wetting agents (e.g., sodium lauryl sulfate).

[0215] The present dsRNAs can be formulated into compositions (e.g., pharmaceutical compositions) containing the dsRNA admixed, encapsulated, conjugated, or otherwise associated with other molecules, molecular structures, or mixtures of nucleic acids. For example, a composition comprising one or more dsRNAs as described herein can contain other therapeutic agents such as other lipid lowering agents (e.g., statins). In some embodiments, the composition (e.g., pharmaceutical composition) further comprises a delivery vehicle as described herein.

[0216] A dsRNA of the present disclosure may be delivered directly or indirectly. In some embodiments, the dsRNA is delivered directly by administering a pharmaceutical composition comprising the dsRNA to a subject. In some embodiments, the dsRNA is delivered indirectly by administering one or more vectors described below.

[0217] A dsRNA of the present disclosure may be delivered by any method known in the art, including, for example, by adapting a method of delivering a nucleic acid molecule for use with a dsRNA (see, e.g., Akhtar et al., Trends Cell. Biol. (1992) 2(5):139-44; PCT Patent Publication No. WO 94/02595), or via additional methods known in the art (see, e.g., Kanasty et al., Nature Materials (2013) 12:967-77; Wittrup and Lieberman, Nature Reviews Genetics (2015) 16:543-52; Whitehead et al., (2009) Nature Reviews Drug Discovery 8:129-38; Gary et al., J Control Release (2007) 121(1-2):64-73; Wang et al., AAPS J. (2010) 12(4):492-503; Draz et al., Theranostics (2014) 4(9):872-92; Wan et al., Drug Deliv Transl Res. (2013) 4(1):74-83; Erdmann and Barciszewski (eds.) (2010) “RNA Technologies and Their Applications,” Springer-Verlag Berlin Heidelberg, DOI 10.1007/978-3-642-12168-5; Xu and Wang, Asian Journal of Pharmaceutical Sciences (2015) 10(1):1-12). For in vivo delivery, dsRNA can be injected into a tissue site or administered systemically (e.g., in nanoparticle form via inhalation). In vivo delivery can also be mediated by a beta-glucan delivery system (see, e.g., Tesz et al., Biochem J. (2011) 436(2):351-62). In vitro introduction into a cell includes methods known in the art such as electroporation and lipofection.

[0218] In some embodiments, a dsRNA of the present disclosure is delivered by a delivery vehicle comprising the dsRNA. In some embodiments, the delivery vehicle is a liposome, lipoplex, complex, or nanoparticle.

### III.1 Liposomal Formulations

[0219] Liposomes are unilamellar or multilamellar vesicles which have a membrane formed from a lipophilic material and an aqueous interior. In some embodiments, a liposome is a vesicle composed of amphiphilic lipids arranged in a spherical bilayer or bilayers. The aqueous portion contains the composition to be delivered. Cationic liposomes possess the advantage of being able to fuse to the cell wall. Advantages of liposomes include, e.g., that liposomes obtained from natural phospholipids are biocompatible and biodegradable; that liposomes can incorporate a wide range of water and lipid soluble drugs; and that liposomes can protect encapsulated drugs in their internal compartments from metabolism and degradation (Rosoff, in Pharmaceutical Dosage Forms, Lieberman, Rieger and Banker (Eds.), 1988, Marcel Dekker, Inc., New York, N.Y., volume 1, p. 245). Important considerations in the preparation of liposome formulations are the lipid surface charge, vesicle size and the aqueous volume of the liposomes. For example, engineered cationic liposomes and sterically stabilized liposomes can be used to deliver the dsRNA. See, e.g., Podesta et al., Methods Enzymol. (2009) 464:343-54; U.S. Pat. No. 5,665,710.

### III.2 Nucleic Acid-Lipid Particles

[0220] In some embodiments, a dsRNA of the present disclosure is fully encapsulated in a lipid formulation, e.g., to form a nucleic acid-lipid particle such as, without limitation, a SPLP, pSPLP, or SNALP. As used herein, the term “SNALP” refers to a stable nucleic acid-lipid particle, including SPLP. As used herein, the term “SPLP” refers to a nucleic acid-lipid particle comprising plasmid DNA encapsulated within a lipid vesicle. Nucleic acid-lipid particles, e.g., SNALPs, typically contain a cationic lipid, a non-cationic lipid, and a lipid that prevents aggregation of the particle (e.g., a PEG-lipid conjugate). SNALPs and SPLPs are useful for systemic applications, as they exhibit extended circulation lifetimes following intravenous (i.v.) injection and accumulate at distal sites (e.g., sites physically separated from the administration site). SPLPs include “pSPLPs,” which include an encapsulated condensing agent-nucleic acid complex as set forth in PCT Publication No. WO 00/03683.

[0221] In some embodiments, dsRNAs when present in nucleic acid-lipid particles are resistant in aqueous solution to degradation with a nuclease. Nucleic acid-lipid particles and their methods of preparation are disclosed in, e.g., U.S. Pat. Nos. 5,976,567; 5,981,501; 6,534,484; 6,586,410; and 6,815,432; and PCT Publication WO 96/40964.

[0222] In some embodiments, the nucleic acid-lipid particles comprise a cationic lipid. Any cationic lipid or mixture thereof known in the art may be used. In some embodiments, the nucleic acid-lipid particles comprise a non-cationic lipid. Any non-cationic lipid or mixture thereof known in the art may be used. In some embodiments, the nucleic acid-lipid particle comprises a conjugated lipid (e.g., to prevent aggregation). Any conjugated lipid known in the art may be used.

### III.3 Additional Formulations

[0223] Factors that are important to consider in order to successfully deliver a dsRNA molecule in vivo include: (1) biological stability of the delivered molecule, (2) preventing nonspecific effects, and (3) accumulation of the delivered molecule in the target tissue. The nonspecific effects of a dsRNA can be minimized by local administration, for example by direct injection or implantation into a tissue or topically administering the preparation. For administering a dsRNA systemically for the treatment of a disease, the dsRNA may be modified or alternatively delivered using a drug delivery system; both methods act to prevent the rapid degradation of the dsRNA by endo- and exonucleases in vivo. Modification of the RNA or the pharmaceutical excipient may also permit targeting of the dsRNA composition to the target tissue and avoid undesirable off-target effects. As described above, dsRNA molecules may be modified by chemical conjugation to lipophilic groups such as cholesterol to enhance cellular uptake and prevent degradation. In some embodiments, the dsRNA is delivered using drug delivery systems such as a nanoparticle (e.g., a calcium phosphate nanoparticle), a dendrimer, a polymer, liposomes, or a cationic delivery system. Positively charged cationic delivery systems facilitate binding of a dsRNA molecule (negatively charged) and also enhance interactions at the negatively charged cell membrane to permit efficient uptake of a dsRNA by the cell. Cationic lipids, dendrimers, or polymers can either be bound to a dsRNA, or induced to form a vesicle or micelle (See, e.g., Kim et al., Journal of Controlled Release (2008) 129(2):107-16) that encases a dsRNA. The formation of vesicles or micelles further prevents degradation of the dsRNA when administered systemically. Methods for making and administering cationic-dsRNA complexes are known in the art. In some embodiments, a dsRNA may form a complex with cyclodextrin for systemic administration.

III.4 Vector-Encoded dsRNAs

[0224] A dsRNA of the present disclosure may be delivered to the target cell indirectly by introducing into the target cell a recombinant vector (DNA or RNA vector) encoding the dsRNA. The dsRNA will be expressed from the vector inside the cell, e.g., in the form of shRNA, where the shRNA is subsequently processed into siRNA intracellularly. In some embodiments, the vector is a plasmid, cosmid, or viral vector. In some embodiments, the vector is compatible with expression in prokaryotic cells. In some embodiments, the vector is compatible with expression in E. coli. In some embodiments, the vector is compatible with expression in eukaryotic cells. In some embodiments, the vector is compatible with expression in yeast cells. In some embodiments, the vector is compatible with expression in vertebrate cells. Any expression vector capable of encoding dsRNA known in the art may be used, including, for example, vectors derived from adenovirus (AV), adeno-associated virus (AAV), retroviruses (e.g., lentiviruses (LV), Rhabdoviruses, murine leukemia virus, etc.), herpes virus, SV40 virus, polyoma virus, papilloma virus, picornavirus, pox virus (e.g., orthopox or avipox), and the like. The tropism of viral vectors or viral-derived vectors may be modified by pseudotyping the vectors with envelope proteins or other surface antigens from one or more other viruses, or by substituting different viral capsid proteins, as appropriate. For example, lentiviral vectors may be pseudotypes with surface proteins from vesicular stomatitis virus (VSV), rabies, Ebola, Mokola, and the like. AAV vectors may be made to target different cells by engineering the vectors to express different capsid protein serotypes. For example, an AAV vector expressing a serotype 2 capsid on a serotype 2 genome is called AAV 2/2. This serotype 2 capsid gene in the AAV 2/2 vector can be replaced by a serotype 5 capsid gene to produce an AAV 2/5 vector. Techniques for constructing AAV vectors which express different capsid protein serotypes have been described previously (see, e.g., Rabinowitz et al., J. Virol. (2002) 76:791-801).

[0225] Selection of recombinant vectors, methods for inserting nucleic acid sequences into the vector for expressing a dsRNA, and methods of delivering vectors into one or more cells of interest are known in the art. See, e.g., Domburg, Gene Therap. (1995) 2:301-10; Eglitis, Biotechniques (1998) 6:608-14; Miller, Hum Gene Therap. (1990) 1:5-14; Anderson, Nature (1998) 392:25-30; Xia et al., Nat Biotech. (2002) 20:1006-10; Robinson et al., Nat Genet. (2003) 33:401-6; Samulski et al., J Virol. (1987) 61:3096-101; Fisher et al., J Virol. (1996) 70:520-32; Samulski et al., J Virol. (1989) 63:3822-6; U.S. Pat. Nos. 5,252,479 and 5,139,941; and PCT Publications WO 94/13788 and WO 93/24641.

[0226] Vectors useful for the delivery of a dsRNA as described herein may include regulatory elements (e.g., heterologous promoter, enhancer, etc.) sufficient for expression of the dsRNA in the desired target cell or tissue. In some embodiments, the vector comprises one or more sequences encoding the dsRNA linked to one or more heterologous promoters. Any heterologous promoter known in the art capable of expressing a dsRNA may be used, including, for example, the U6 or H1 RNA pol III promoters, the T7 promoter, and the cytomegalovirus promoter. The one or more heterologous promoters may be an inducible promoter, a repressible promoter, a regulatable promoter, and/or a tissue-specific promoter. Selection of additional promoters is within the abilities of one of ordinary skill in the art. In some embodiments, the regulatory elements are selected to provide constitutive expression. In some embodiments, the regulatory elements are selected to provide regulated/inducible/repressible expression. In some embodiments, the regulatory elements are selected to provide tissue-specific expression. In some embodiments, the regulatory elements and sequence encoding the dsRNA form a transcription unit.

[0227] A dsRNA of the present disclosure may be expressed from transcription units inserted into DNA or RNA vectors (see, e.g., Couture et al., TIG (1996) 12:5-10; PCT Patent Publications WO 00/22113 and WO 00/22114; and U.S. Pat. No. 6,054,299). Expression may be transient (on the order of hours to weeks) or sustained (weeks to months or longer), depending upon the specific construct used and the target tissue or cell type. These transgenes can be introduced as a linear construct, a circular plasmid, or a viral vector, which can be an integrating or non-integrating vector. The transgene can also be constructed to permit it to be inherited as an extrachromosomal plasmid (Gassmann et al., PNAS (1995) 92:1292).

[0228] In some embodiments, the sense and antisense strands of a dsRNA are encoded on separate expression vectors. In some embodiments, the sense and antisense strands are expressed on two separate expression vectors that are co-introduced (e.g., by transfection or infection) into the same target cell. In some embodiments, the sense and antisense strands are encoded on the same expression vector. In some embodiments, the sense and antisense strands are transcribed from separate promoters which are located on the same expression vector. In some embodiments, the sense and antisense strands are transcribed from the same promoter on the same expression vector. In some embodiments, the sense and antisense strands are transcribed from the same promoter as an inverted repeat joined by a linker polynucleotide sequence such that the dsRNA has a stem and loop structure.

IV. dsRNA Therapy

[0229] Certain aspects of the present disclosure relate to methods for inhibiting the expression of the ANGPTL3 gene in a subject (e.g., a primate subject such as a human) comprising administering a therapeutically effective amount of one or more dsRNAs of the present disclosure, one or more vectors of the present disclosure, or one or more pharmaceutical compositions of the present disclosure. Certain aspects of the present disclosure relate to methods of treating and/or preventing one or more conditions described herein (e.g., an ANGPTL3-associated condition) comprising administering one or more dsRNAs of the present disclosure and/or one or more vectors of the present disclosure and/or one or more pharmaceutical compositions comprising one or more dsRNAs as described herein. In some embodiments, downregulating ANGPTL3 expression in a subject alleviates one or more symptoms of a lipid metabolism disorder such as hyperlipidemia, familial combined hyperlipidemia, familial hypercholesterolemia (e.g., HoFH), and polygenic hypercholesterolemia; or a disease or condition associated with elevated TGs and LDL-c (e.g., atherosclerosis, arteriosclerosis, coronary heart disease, heart attack, stroke, cachexia, pancreatitis, and diseases in the central nervous system such as Alzheimer's disease and multiple sclerosis), in the subject.

[0230] The pharmaceutical composition of the present disclosure may be administered in dosages sufficient to inhibit expression of the ANGPTL3 gene. In some embodiments, a suitable dose of a dsRNA described herein is in the range of 0.001 mg/kg-200 mg/kg body weight of the recipient. In certain embodiments, a suitable dose is in the range of 0.001 mg/kg-50 mg/kg body weight of the recipient, e.g., in the range of 0.001 mg/kg-20 mg/kg body weight of the recipient. Treatment of a subject with a therapeutically effective amount of a pharmaceutical composition can include a single treatment or a series of treatments.

[0231] As used herein, the terms “therapeutically effective amount” and “prophylactically effective amount” refer to an amount that provides a therapeutic benefit in the treatment, prevention, or management of pathological processes mediated by ANGPTL3 expression, or an overt symptom of pathological processes mediated by ANGPTL3 expression.

[0232] As used herein, the term “ANGPTL3-associated condition” is intended to include any condition in which inhibiting the activity of ANGPTL3 is beneficial. Such a condition may be caused, for example, by excess production of the ANGPTL3 protein, by ANGPTL3 gene mutations that increase ANGPTL3 activity or expression, by abnormal cleavage of the ANGPTL3 protein that increases activity or decreases degradation, and/or by abnormal interactions between ANGPTL3 and other proteins or other endogenous or exogenous substances such that ANGPTL3 activity is increased or degradation is decreased. An ANGPTL3-associated condition may be selected from hypertriglyceridemia and associated diseases and conditions such as atherosclerosis, pancreatitis, and hyperlipidemia such as familial combined hyperlipidemia, familial hypercholesterolemia (e.g., HoFH), and polygenic hypercholesterolemia. An ANGPTL3-associated condition may be, e.g., a lipid metabolism disorder, such as hypertriglyceridemia.

[0233] In some embodiments, a dsRNA described herein is used to treat a subject with a lipid metabolism disorder such as hypertriglyceridemia or any symptoms or conditions associated with hypertriglyceridemia. In certain embodiments, a dsRNA described herein is used to treat a patient with drug-induced hypertriglyceridemia, diuretic-induced hypertriglyceridemia, alcohol-induced hypertriglyceridemia, β-adrenergic blocking agent-induced hypertriglyceridemia, estrogen-induced hypertriglyceridemia, glucocorticoid-induced hypertriglyceridemia, retinoid-induced hypertriglyceridemia, cimetidine-induced hypertriglyceridemia, familial hypertriglyceridemia, acute pancreatitis associated with hypertriglyceridemia, and/or hepatosplenomegaly associated with hypertriglyceridemia.

[0234] In some embodiments, a dsRNA described herein is used to treat a subject having one or more conditions selected from: lipidemia (e.g., hyperlipidemia), dyslipidemia (e.g., atherogenic dyslipidemia, diabetic dyslipidemia, or mixed dyslipidemia), hyperlipoproteinemia, hypercholesterolemia (e.g., HoFH caused by, for example, a loss-of-function genetic mutation in the LDL receptor (LDLR), rendering a deficient or inactive LDLR), gout associated with hypercholesterolemia, chylomicronemia, lipodystrophy, lipoatrophy, metabolic syndrome, diabetes (Type I or Type II), pre-diabetes, Cushing's syndrome, acromegaly, systemic lupus erythematosus, dysglobulinemia, polycystic ovary syndrome, Addison's disease, glycogen storage disease type 1, hypothyroidism, uremia, adriamycin cardiomyopathy, lipoprotein lipase deficiency, lysosomal acid lipase deficiency, xanthomatosis, eruptive xanthoma, and lipemia retinalis.

[0235] Additionally or alternatively, a dsRNA described herein may be used to treat a subject with one or more pathological conditions associated with any of the disorders described herein, such as heart and circulatory conditions (e.g., atherosclerosis, angina, hypertension, congestive heart failure, coronary artery disease, restenosis, myocardial infarction, stroke, aneurysm, cerebrovascular diseases, and peripheral vascular diseases), liver disease, kidney disease, nephrotic syndrome, and chronic renal disease (e.g., uremia, nephrotic syndrome, maintenance dialysis, and renal transplantation).

[0236] In some embodiments, a dsRNA described herein may be used to treat a subject with one or more conditions associated with any genetic profile (e.g., familial hypertriglyceridemia, familial combined lipidemia, familial hypobetalipoproteinemia, or familial dysbetalipoproteinemia), treatment (e.g., use of thiazide diuretics, oral contraceptives and other estrogens, certain beta-adrenergic blocking drugs, propofol, HIV medications, isotretinoin, or protease inhibitors), or lifestyle (e.g., cigarette smoking, excessive alcohol consumption, high carbohydrate diet, or high fat diet) that results in or results from elevated blood triglycerides or lipids. Triglyceride levels (e.g., serum triglyceride levels) of over 150 mg/dL are considered elevated for risk of cardiovascular conditions. Triglyceride levels (e.g., serum triglyceride levels) of 500 mg/dL or higher are considered elevated for risk of pancreatitis.

[0237] In some embodiments, a dsRNA described herein may be used to manage body weight or reduce fat mass in a subject.

[0238] In some embodiments, a dsRNA as described herein inhibits expression of the human ANGPTL3 gene, or both human and cynomolgus ANGPTL3 genes. The expression of the ANGPTL3 gene in a subject may be inhibited, and/or the ANGPTL3 protein levels in the subject may be reduced, by at least about 20%, at least about 25%, at least about 30%, at least about 35%, at least about 40%, at least about 45%, at least about 50%, at least about 55%, at least about 60%, at least about 65%, at least about 70%, at least about 75%, at least about 80%, at least about 85%, at least about 90%, at least about 95%, at least about 99%, or about 100% after treatment as compared to pretreatment levels. In some embodiments, expression of the ANGPTL3 gene is inhibited, and/or the ANGPTL3 protein levels in the subject may be reduced, by at least about 2, at least about 5, at least about 10, at least about 15, at least about 20, at least about 25, at least about 50, at least about 75, or at least about 100 fold after treatment as compared to pretreatment levels. In some embodiments, the ANGPTL3 gene is inhibited, or the ANGPTL3 protein levels are reduced, in the liver of the subject.

[0239] In some embodiments, expression of the ANGPTL3 gene is decreased by the dsRNA for about 12 or more, 24 or more, or 36 or more hours. In some embodiments, expression of the ANGPTL3 gene is decreased for an extended duration, e.g., at least about two, three, four, five, or six days or more, e.g., about one week, two weeks, three weeks, four weeks, one month, two months, or longer.

[0240] As used herein, the terms “inhibit the expression of” or “inhibiting expression of,” insofar as they refer to the ANGPTL3 gene, refer to the at least partial suppression of the expression of the ANGPTL3 gene, as manifested by a reduction in the amount of mRNA transcribed from the ANGPTL3 gene in a first cell or group of cells treated such that the expression of the ANGPTL3 gene is inhibited, as compared to a second cell or group of cells substantially identical to the first cell or group of cells but which has or have not been so treated (control cells). Such inhibition can be assessed, e.g., by Northern analysis, in situ hybridization, B-DNA analysis, expression profiling, transcription of reporter constructs, and other techniques known in the art. As used herein, the term “inhibiting” is used interchangeably with “reducing,” “silencing,” “downregulating,” “suppressing,” and other similar terms, and include any level of inhibition. The degree of inhibition is usually expressed in terms of (((mRNA in control cells)−(mRNA in treated cells))/(mRNA in control cells))×100%.

[0241] Alternatively, the degree of inhibition may be given in terms of a reduction of a parameter that is functionally linked to ANGPTL3 gene transcription, e.g., the amount of protein encoded by the ANGPTL3 gene in a cell (as assessed, e.g., by Western analysis, expression of a reporter protein, ELISA, immunoprecipitation, or other techniques known in the art), or the number of cells displaying a certain phenotype, e.g., apoptosis. In principle, ANGPTL3 gene silencing may be determined in any cell expressing the target, either constitutively or by genomic engineering, and by any appropriate assay. However, when a reference is needed in order to determine whether a given dsRNA inhibits the expression of the ANGPTL3 gene by a certain degree and therefore is encompassed by the present disclosure, the assays provided in the Examples below shall serve as such a reference.

[0242] In some embodiments, the effect of inhibiting ANGPTL3 gene expression by any of the methods described herein results in a decrease in triglyceride levels in a subject (e.g., in the blood and/or serum of the subject). In some embodiments, triglyceride levels are decreased to below one of the following levels: 500, 450, 400, 350, 300, 250, 200, 190, 180, 170, 160, 150, 140, 130, 120, 110, 100, 90, 80, 70, 60, or 50 mg/dL. In some embodiments, LDL levels are decreased to below one of the following levels: 190, 180, 170, 160, 150, 140, 130, 120, 110, 100, or 70 mg/dL.

[0243] A subject's triglyceride levels may be determined in any of numerous ways known in the art. In some embodiments, a subject's triglyceride levels are determined using a sample from the subject such as blood, serum, or plasma.

[0244] A dsRNA or pharmaceutical composition described herein may be administered by any means known in the art, including, without limitation, oral or parenteral routes, including intravenous, intramuscular, subcutaneous, pulmonary, transdermal, and airway (aerosol) administration. Typically, when treating a patient with hypertriglyceridemia, the dsRNA molecules are administered systemically via parenteral means. In some embodiments, the dsRNAs and/or compositions are administered by subcutaneous administration. In some embodiments, the dsRNAs and/or compositions are administered by intravenous administration. In some embodiments, the dsRNAs and/or compositions are administered by pulmonary administration.

[0245] As used herein, in the context of ANGPTL3 expression, the terms “treat,” “treatment” and the like refer to relief from or alleviation of pathological processes mediated by target gene expression. In the context of the present disclosure, insofar as it relates to any of the conditions recited herein, the terms “treat,” “treatment,” and the like refer to relieving or alleviating one or more symptoms associated with said condition. For example, in the context of hypertriglyceridemia, treatment may involve a decrease in serum triglyceride levels. As used herein, to “alleviate” a disease, disorder or condition means reducing the severity and/or occurrence frequency of the symptoms of the disease, disorder, or condition. Further, references herein to “treatment” include references to curative, palliative and prophylactic treatment.

[0246] As used herein, the terms “prevent” or “delay progression of” (and grammatical variants thereof), with respect to a condition relate to prophylactic treatment of a condition, e.g., in an individual suspected to have or be at risk for developing the condition. Prevention may include, but is not limited to, preventing or delaying onset or progression of the condition and/or maintaining one or more symptoms of the disease at a desired or sub-pathological level. For example, in the context of hypertriglyceridemia, prevention may involve maintaining serum triglyceride levels at a desired level in an individual suspected to have or be at risk for developing hypertriglyceridemia.

[0247] It is understood that the dsRNAs of the present disclosure may be for use in a treatment as described herein, may be used in a method of treatment as described herein, and/or may be for use in the manufacture of a medicament for a treatment as described herein.

[0248] In some embodiments, a dsRNA of the present disclosure is administered in combination with one or more additional therapeutic agents, such as other siRNA therapeutic agents, monoclonal antibodies, and small molecules, to provide a greater improvement to the condition of the patient than administration of the dsRNA alone. In certain embodiments, the additional therapeutic agent provides an anti-inflammatory effect. In certain embodiments, the additional therapeutic agent is an agent that treats hypertriglyceridemia, such as a lipid-lowering agent.

[0249] In some embodiments, the additional agent may be one or more of a HMG-CoA reductase inhibitor (e.g., a statin), a fibrate, a bile acid sequestrant, nicotinic acid, an antiplatelet agent, an angiotensin converting enzyme inhibitor, an angiotensin II receptor antagonist (e.g., losartan potassium), an acylCoA cholesterol acetyltransferase (ACAT) inhibitor, a cholesterol absorption inhibitor, a cholesterol ester transfer protein (CETP) inhibitor, a microsomal triglyceride transfer protein (MTTP) inhibitor, a cholesterol modulator, a bile acid modulator, a peroxisome proliferation activated receptor (PPAR) agonist, an omega-3 fatty acid (e.g., fish oil or flaxseed oil), and insulin or an insulin analog. Particular examples include, without limitation, atorvastatin, pravastatin, simvastatin, lovastatin, fluvastatin, cerivastatin, rosuvastatin, pitavastatin, ezetimibe, bezafibrate, clofibrate, fenofibrate, gemfibrozil, ciprofibrate, cholestyramine, colestipol, colesevelam, and niacin.

[0250] In certain embodiments, a dsRNA as described herein may be administered in combination with another therapeutic intervention such as lipid lowering, weight loss, dietary modification, and/or moderate exercise.

[0251] Genetic predisposition plays a role in the development of target gene associated diseases, e.g., hypertriglyceridemia. Therefore, a subject in need of treatment with one or more dsRNAs of the present disclosure may be identified by taking a family history, or, for example, screening for one or more genetic markers or variants. Examples of genes involved in hypertriglyceridemia may include, without limitation, LPL, APOB, APOC2, APOA5, APOE, LMF1, GCKR, GPIHBP1, and GPD1. In certain embodiments, a subject in need of treatment with one or more dsRNAs of the present disclosure may be identified by screening for variants of or loss-of-function mutations in any of these genes or any combination thereof.

[0252] A healthcare provider, such as a doctor, nurse, or family member, can take a family history before prescribing or administering a dsRNA of the present disclosure. In addition, a test may be performed to determine a genotype or phenotype. For example, a DNA test may be performed on a sample from the subject, e.g., a blood sample, to identify the ANGPTL3 genotype and/or phenotype before the dsRNA is administered to the subject.

### V. Kits and Articles of Manufacture

[0253] Certain aspects of the present disclosure relate to an article of manufacture or a kit comprising one or more of the dsRNAs, vectors, or compositions (e.g., pharmaceutical compositions) as described herein useful for the treatment and/or prevention of an ANGPTL3-associated condition (e.g., a lipid metabolism disorder such as hypertriglyceridemia). The article of manufacture or kit may further comprise a container and a label or package insert on or associated with the container. Suitable containers include, for example, bottles, vials, syringes, IV solution bags, etc. The containers may be formed from a variety of materials such as glass or plastic. The container holds a composition which is by itself or combined with another composition effective for treating or preventing the disease and may have a sterile access port (for example the container may be an intravenous solution bag or a vial having a stopper pierceable by a hypodermic injection needle). At least one active agent in the composition is a dsRNA as described herein. The label or package insert indicates that the composition is used for treating an ANGPTL3-associated condition. In some embodiments, the condition is a lipid metabolism disorder such as hypertriglyceridemia and/or another condition described herein. Moreover, the article of manufacture or kit may comprise (a) a first container with a composition contained therein, wherein the composition comprises a dsRNA as described herein; and (b) a second container with a composition contained therein, wherein the composition comprises a second therapeutic agent (e.g., an additional agent as described herein). The article of manufacture or kit in this aspect of the present disclosure may further comprise a package insert indicating that the compositions can be used to treat a particular disease. Alternatively, or additionally, the article of manufacture or kit may further comprise a second (or third) container comprising a pharmaceutically-acceptable buffer, such as bacteriostatic water for injection (BWFI), phosphate-buffered saline, Ringer's solution and dextrose solution. It may further include other materials desirable from a commercial and/or user standpoint, including other buffers, diluents, filters, needles, and syringes.

[0254] Unless otherwise defined herein, scientific and technical terms used in connection with the present disclosure shall have the meanings that are commonly understood by those of ordinary skill in the art. Exemplary methods and materials are described below, although methods and materials similar or equivalent to those described herein can also be used in the practice or testing of the present disclosure. In case of conflict, the present specification, including definitions, will control.

[0255] Generally, nomenclature used in connection with, and techniques of, cell and tissue culture, molecular biology, cardiology, microbiology, genetics, analytical chemistry, synthetic organic chemistry, medicinal and pharmaceutical chemistry, and protein and nucleic acid chemistry and hybridization described herein are those well-known and commonly used in the art. Enzymatic reactions and purification techniques are performed according to the manufacturer's specifications, as commonly accomplished in the art or as described herein.

[0256] Further, unless otherwise required by context, singular terms shall include pluralities and plural terms shall include the singular. Throughout this specification and embodiments, the words “have” and “comprise,” or variations such as “has,” “having,” “comprises,” or “comprising,” will be understood to imply the inclusion of a stated integer or group of integers but not the exclusion of any other integer or group of integers.

[0257] All publications and other references mentioned herein are incorporated by reference in their entirety. Although a number of documents are cited herein, this citation does not constitute an admission that any of these documents forms part of the common general knowledge in the art.

### EXAMPLES

[0258] In order for the present disclosure to be better understood, the following examples are set forth. These examples are for illustration only and are not to be construed as limiting the scope of the present disclosure in any manner.

### Example 1: siRNA Synthesis and Purification

[0259] siRNAs, including non-targeting control siRNAs (NT control), were produced using solid phase oligonucleotide synthesis.

### Methods

[0260] siRNA Production

[0261] RNA oligonucleotides were synthesized at a scale of 1 μmol (in vitro) or 10 μmol (in vivo) on a ABI 394 DNA/RNA or BioAutomation MerMade 12 synthesizer using commercially available 5′-O-DMT-3′-O-(2-cyanoethyl-N,N-diisopropyl) phosphoramidite monomers (SAFC) of uridine, 4-N-acetylcytidine (C^{Ac}), 6-N-benzoyladenosine (A^{Bz}) and 2-N-isobutyrylguanosine (G^{iBu}) with 2′-OMe or 2′-F modification, and the solid supports 5′-O-DMT-thymidine-CPG and 3′-O-DMT-thymidine-CPG (invdT, Link) following standard protocols for solid phase synthesis and deprotection (Beaucage, Curr Opin Drug Discov Devel. (2008) 11:203-16; Mueller et al., Curr Org Synth (2004) 1:293-307).

[0262] Phosphoramidite building blocks were used as 0.1 M solutions in acetonitrile and activated with 5-(bis-3,5-trifluoromethylphenyl)-1H-tetrazole (activator 42, 0.25 M in acetonitrile, Sigma Aldrich). Reaction times of 300 s were used for the phosphoramidite couplings. As capping reagents, acetic anhydride in THF (CapA for ABI, Sigma Aldrich) and N-methylimidazole in THF (CapB for ABI, Sigma Aldrich) were used. As oxidizing reagent, iodine in THF/pyridine/water (0.02 M; oxidizer for ABI, Sigma Aldrich) was used. Deprotection of the DMT-protecting group was done using dichloroacetic acid in DCM (DCA deblock, Sigma Aldrich). Final cleavage from solid support and deprotection (acyl- and cyanoethyl-protecting groups) was achieved with NH₃ (32% aqueous solution/ethanol, v/v 3:1).

[0263] The crude oligonucleotides were analyzed by IEX and LC-MS and purified by anion-exchange high-performance liquid chromatography (IEX) using a linear gradient of 10-65% buffer B in 30 min. ÄKTA purifier (Thermo Fisher Scientific DNAPac PA200 semi prep ion exchange column, 8 μm particles, width 22 mm×length 250 mm).
[0264] Buffer A: 1.50 l H₂O, 2.107 g NaClO₄, 438 mg EDTA, 1.818 g TRIS, 540.54 g urea, pH 7.4.
[0265] Buffer B: 1.50 l H₂O, 105.34 g NaClO₄, 438 mg EDTA, 1.818 g TRIS, 540.54 g urea, pH 7.4.

[0266] Isolation of the oligonucleotides was achieved by precipitation, induced by the addition of 4 volumes of ethanol and storing at −20° C.

[0267] To ensure high fidelity of the data, all single strands were HPLC purified to >85% purity. The purity and identity of the oligonucleotides was confirmed by ion exchange chromatography and LC-MS, respectively.

### Duplex Annealing

[0268] For the in vitro experiments (100 μM solutions) and in vivo experiments (10 mg/ml), stock solutions of siRNAs in PBS were prepared by mixing equimolar amounts of complementary sense and antisense strands in 1×PBS buffer. The solutions were heated to 90° C. for 10 min and allowed to slowly cool to room temperature to complete the annealing process. siRNAs were further characterized by HPLC and were stored frozen until use.

siRNA Sequences

[0269] The sequences of each siRNA, and sequences including nucleotide modifications, are shown in Tables 1 and 2, supra.

siRNA Stability in Mouse Serum

[0270] Modified siRNAs listed in Table 2 were tested for nuclease stability in 50% mouse serum. 160 μL of 2.5 μM siRNA in 1×DPBS (Life Technologies, cat. no. 14190-094) and 160 μL mouse serum (Sigma, cat. no. M5905) were incubated at 37° C. for up to 72 h. At each time point (0 h, 8 h, 24 h, 32 h, 48 h, 56 h, and 72 h), 21 μL of the reaction was taken out and quenched with 23 μL stop solution (Tissue & Cell Lysis Solution (Epicentre, cat. no. MTC096H), 183 μL 20 mg/mL Proteinase K (Sigma, cat. no. P2308), 1694 μL water) at 65° C. for 30 min. Prior to HPLC analysis on a Waters 2695 Separation Module and a 2487 Dual Absorbance Detector, 33 μL RNase-free water was added to each sample. 50 μL of the solution was analyzed by HPLC using a DNAPac PA200 analytical column (Thermo Scientific, cat. no. 063000) and the following gradient:

| Time | Flow | % Buffer | % Buffer |
|---|---|---|---|
| (min) | (mL/min) | A* | B** |
| 0 | 1 | 75 | 25 |
| 20 | 1 | 35 | 65 |

[0271] Buffer A: 20 mM sodium phosphate (Sigma, Cat. No. 342483), pH 11;
[0272] Buffer B: 20 mM sodium phosphate (Sigma, Cat. No. 342483), 1 M sodium bromide (Sigma, Cat. No. 02119), pH 11.

[0273] Serum half-lives were estimated for both strands of the siRNA.

### Example 2: Identification of siRNAs for Inhibition of Human ANGPTL3 Expression

### Methods

### Cells and Tissue Culture

[0274] Human Hep3B cells were grown at 37° C., 5% CO₂ and 95% relative humidity (RH), and cultivated in EMEM medium (ATCC, cat. no. 30-2003) supplemented with 10% FBS.

siRNA Transfections

[0275] For knock-down experiments in Hep3B cells, 20,000 cells/well were used in 96-well plates (Greiner, cat. no. 655180). The cells were transfected with ANGPTL3 siRNAs at 0.1 nM and 1 nM using 0.2 μL/well of Lipofectamine RNAiMAX transfection reagent (ThermoFisher) according to the manufacturer's protocol in a reverse transfection setup, and incubated for 48 h without medium change. Usually, N=4 technical replicates were carried out per test sample.

mRNA Expression Analysis

[0276] 48 or 72 hours after siRNA transfection or free siRNA uptake, the cellular RNA was harvested by usage of Promega's SV96 total RNA isolation system (cat. no. Z3500) according to the manufacturer's protocol, including a DNase step during the procedure.

[0277] For cDNA synthesis, the ThermoFisher Reverse Transcriptase kit (cat. no. N8080234) was used. cDNA was synthesized from 30 ng RNA using 1.2 μL 10×RT buffer, 2.64 μL MgCl₂ (25 mM), 2.4 μL dNTPs (10 mM), 0.6 μL random hexamers (50 μM), 0.6 μL Oligo(dT) 16 (SEQ ID NO: 1185) (50 μM), 0.24 μL RNase inhibitor (20 U/μL) and 0.3 μL Multiscribe (50 U/μL) in a total volume of 12 μL. Samples were incubated at 25° C. for 10 minutes and 42° C. for 60 minutes. The reaction was stopped by heating to 95° C. for 5 minutes.

[0278] Human and cynomolgus ANGPTL3 mRNA levels were quantified by qPCR using the ThermoFisher TaqMan Universal PCR Master Mix (cat. no. 4305719) and the following TaqMan Gene Expression assays:

| | |
|---|---|
| Human | Hs00205581_m1 |
| Cynomolgus | Mf04384789_m1 |

[0279] PCR was performed in technical duplicates with an ABI Prism 7900 system under the following PCR conditions: 2 minutes at 50° C., 10 minutes at 95° C., 40 cycles with 95° C. for 15 seconds and 1 minute at 60° C. PCR was set up as a simplex PCR detecting the target gene in one reaction and the housekeeping gene (human/cynomolgus RPL37A) for normalization in a parallel reaction. The final volume for the PCR reaction was 12.5 μL in a 1×PCR master mix; RPL37A primers were used at a final concentration of 50 nM and the probe was used at a final concentration of 200 nM. The ΔΔCt method was applied to calculate relative expression levels of the target transcripts. Percentage of target gene expression was calculated by normalization based on the levels of non-targeting siRNA control treated cells.

### IC₅₀ Measurements

[0280] For IC₅₀ measurements, 20,000 human Hep3B cells in 96-well plates were transfected with Lipofectamine RNAiMAX for 48 hours with the indicated ANGPTL3 siRNAs at 7 concentrations starting from 25 nM using 5-8-fold dilution steps. The half maximal inhibitory concentration (IC₅₀) for each siRNA was calculated by applying a Biostat-Speed statistical calculation tool. Results were obtained using the 4-parameter logistic model according to Ratkovsky and Reedy (Biometrics 42(3):575-582 (1986)). The adjustment was obtained by non-linear regression using the Levenberg-Marquardt algorithm in SAS v9.1.3 software.

### Cytotoxicity

[0281] Cytotoxicity was measured 72 hours after 5 nM and 50 nM siRNA transfections of a culture of 10,000 Hep3B cells per well of a 96-well plate by determining the ratio of cellular viability/toxicity in each sample. Cell viability was measured by determination of the intracellular ATP content using the CellTiter-Glo assay (Promega, cat. no. G7570) according to the manufacturer's protocol. Cell toxicity was measured in the supernatant using the ToxiLight assay (Lonza, cat. no. LT07-217) according to the manufacturer's protocol. 10 nM AllStars Hs Cell Death siRNA (Qiagen, cat. no. SI04381048), 25 μM Ketoconazole (Calbiochem, cat. no. 420600) and 1% Triton X-100 (Sigma, cat. no. T9284) were used as toxic positive controls.

### Results

[0282] In order to identify siRNAs useful in targeting human ANGPTL3, the following criteria were applied for in silico library generation: first, 19mers from the human ANGPTL3 mRNA sequence as set forth in NM_014495.3 were identified in silico with an overlap of 18 nucleotides. From this list of 2933 sequences, molecules were further removed if they had a G/C content of greater than 55% or one or more mismatches with the ANGPTL3 mRNA sequence of Macaca fascicularis (cynomolgus monkey).

[0283] For the remaining sequences, an in silico analysis was then carried out to identify any potential off-target transcripts matching either siRNA strand (sense/antisense) in the human transcriptome (RefSeq RNA version 2015-11-24). Human off-target sequences with RNAseq expression (Illumina Body Atlas) FPKM<0.5 in liver tissue were not considered. All siRNA sequences of interest had either greater than three mismatches to any human transcript expressed in liver other than ANGPTL3, or had two mismatches with four or fewer human genes; sequences that did not meet one of these two criteria were filtered out. After this filtration, 162 potential siRNAs were left (see Table 1, constructs 001-162).

[0284] As described above, the 162 siRNAs were produced with nucleotides having a fixed pattern (see Table 2, constructs 001-162). To test the ability of these 162 siRNAs to reduce expression of ANGPTL3, human Hep3B cells were transfected with 0.1 nM or 1.0 nM of each siRNA and incubated for 48 hours. After incubation, mRNA expression of ANGPTL3 was measured in each sample and compared to negative controls treated with non-targeting siRNA (FIGS. 1A-1C). 15 siRNAs that showed reduction of mRNA expression by at least 80% at a concentration of 1.0 nM, or by at least 70% at a concentration of 0.1 nM, plus three siRNAs binding to a distant sequence region, were selected for further characterization.

[0285] IC₅₀ measurements (Table 4) and a cytotoxicity assay (FIG. 2) were carried out for the selected 18 siRNAs in human Hep3B cells. After removal of 3 siRNAs (siRNA #029, #036, and #145) that showed <40% of NT control Viability/Toxicity ratio (at 50 nM), 11 siRNAs were selected based on their IC₅₀ values for conjugation to GalNAc (Table 4).

TABLE 4
Activity of selected siRNAs

| | | | Selected for |
|---|---|---|---|
| Compound | Iₘₐₓ | IC₅₀ [nM] | GalNAc conjugation |
| siRNA#013 | 0.945 | 9.83E−03 | X |
| siRNA#014 | 0.937 | 3.34E−04 | X |
| siRNA#015 | 0.923 | 7.22E−03 | X |
| siRNA#018 | 0.980 | 5.28E−02 | |
| siRNA#022 | 0.882 | 2.07E−02 | |
| siRNA#027 | 0.818 | 4.75E−02 | |
| siRNA#029 | 0.943 | 2.19E−01 | |
| siRNA#034 | 0.910 | 3.34E−02 | |
| siRNA#036 | 0.872 | 6.52E−02 | |
| siRNA#047 | 0.894 | 2.72E−02 | X |
| siRNA#048 | 0.879 | 1.17E−02 | X |
| siRNA#049 | 0.867 | 9.67E−03 | X |
| siRNA#050 | 0.890 | 5.32E−02 | X |
| siRNA#051 | 0.890 | 1.51E−02 | X |
| siRNA#055 | 0.704 | 1.98E−02 | X |
| siRNA#129 | 0.730 | 2.19E−02 | X |
| siRNA#142 | 0.689 | 1.75E−02 | X |
| siRNA#145 | 0.733 | 2.66E−01 | |

Taken together, these results demonstrate the identification of siRNAs capable of potent inhibition of human ANGPTL3 expression without significant cytotoxicity in human cells.

### Example 3: Identification of Active GalNAc-Conjugated siRNAs for Inhibition of Human and Cynomolgus ANGPTL3 Expression

### Methods

[0286] GalNAc-siRNAs, including non-targeting control siRNAs (NT control), were generated based on the sequences as indicated (see sequence listings above).

### Cells Culture and Assays

[0287] Human (BioreclamationIVT, cat. no. M00995-P) and cynomolgus (Primacyt, cat. no. CHCP-I-T) primary hepatocytes were cultured as follows: cryopreserved cells were thawed and plated using a plating and thawing kit (Primacyt, cat. no. PTK-1), and were incubated at 37° C., 5% C02 and 95% RH. 6 hours after plating, the medium was changed to maintenance medium (KaLy-Cell, cat. no. KLC-MM) supplemented with 1% FBS.

[0288] mRNA expression analysis was performed as described above in Example 2.

### IC₅₀ Measurements

[0289] For demonstration of dose-activity relationships and IC₅₀ measurements in human and cynomolgus primary hepatocytes under free uptake conditions, 50,000-70,000 cells in 96-well plates were incubated for 72 hours without medium change with the siRNAs at concentrations ranging from 10 μM-0.01 nM using 10-fold dilution steps. The half maximal inhibitory concentration (IC₅₀) for each siRNA was calculated by applying a Biostat-Speed statistical calculation tool. Results were obtained using the 4-parameter logistic model according to Ratkovsky and Reedy (Biometrics (1986) 42(3):575-82). The adjustment was obtained by non-linear regression using the Levenberg-Marquardt algorithm in SAS v9.1.3 software.

### Results

[0290] Following selection of potent siRNAs as described above, the inventors went on to demonstrate whether the selected molecules retain their activity in the context of a GalNAc-conjugate suitable for liver specific siRNA delivery in vivo. They also assessed whether this activity holds up in cells from M. fascicularis (cynomolgus monkey).

[0291] The results of the IC₅₀ measurements show that all tested siRNA conjugates except for two retain activity when delivered by free uptake to human primary hepatocytes (Table 5), with IC₅₀ values ranging from 1.95 to 9.2 nM. Surprisingly, however, the performance ranking following free uptake of GalNAc-siRNA differs significantly from that obtained after transfection assisted uptake of unconjugated siRNA (Table 4), including complete failure of two molecules to produce measurable knock-down activity. This indicates that siRNAs seem to have inherent properties based on their sequence that makes them differentially suited for application in the context of GalNAc conjugates with regard to resulting knock-down potency.

TABLE 5
Iₘₐₓ and IC₅₀ of selected GalNAc-conjugated
siRNAs in human primary hepatocytes

| Compound | Iₘₐₓ | IC₅₀ [nM] |
|---|---|---|
| siRNA#013-c | 0.891 | 2.32 |
| siRNA#014-c | 0.912 | 1.95 |
| siRNA#015-c | 0.850 | 3.07 |
| siRNA#047-c | 0.782 | 5.03 |
| siRNA#048-c | 0.768 | 4.39 |
| siRNA#049-c | 0.711 | 4.36 |
| siRNA#050-c | 0.670 | 9.20 |
| siRNA#051-c | 0.735 | 5.50 |
| siRNA#055-c | 0.502 | 2.06 |
| siRNA#129-c | N/A | N/A |
| siRNA#142-c | N/A | N/A |

N/A: No measurable activity.

[0292] Even more surprisingly, some of the tested siRNAs show absence of activity in cynomolgus hepatocytes despite predicted sequence homology to the M. fascicularis sequence XM_005543185.1 (Table 6). This unexpected observation highlights the requirement of a functional assay for activity detection and that the efficacy of siRNAs cannot be predicted purely based on bioinformatical information.

TABLE 6
Iₘₐₓ and IC₅₀ of selected GalNAc-conjugated
siRNAs in cynomolgus primary hepatocytes

| Compound | Iₘₐₓ | IC₅₀ [nM] |
|---|---|---|
| siRNA#013-c | 0.897 | 2.31 |
| siRNA#014-c | 0.893 | 4.15 |
| siRNA#015-c | 0.738 | 2.89 |
| siRNA#047-c | N/A | N/A |
| siRNA#048-c | N/A | N/A |
| siRNA#049-c | N/A | N/A |
| siRNA#050-c | N/A | N/A |
| siRNA#051-c | N/A | N/A |
| siRNA#055-c | N/A | N/A |
| siRNA#129-c | N/A | N/A |
| siRNA#142-c | N/A | N/A |

N/A: No measurable activity.

### Example 4: In Vitro and In Vivo Characterization of GalNAc-Conjugated siRNAs for Inhibition of Human ANGPTL3 Expression

### Methods

### Cells and Tissue Culture

[0293] Human Hep3B cells were grown at 37° C., 5% CO₂ and 95% RH, and cultivated in EMEM medium (ATCC, cat. no. 30-2003) supplemented with 10% FBS.

[0294] Human (BioreclamationIVT, cat. no. M00995-P) and cynomolgus (Primacyt, cat. no. CHCP-T-T) primary hepatocytes were cultured as follows: cryopreserved cells were thawed and plated using a plating and thawing kit (Primacyt, cat. no. PTK-1), and were incubated at 37° C., 5% C02 and 95% RH. 6 hours after plating, the medium was changed to maintenance medium (KaLy-Cell, cat. no. KLC-MM) supplemented with 1% FBS.

[0295] Human peripheral blood mononuclear cells (PBMCs) were isolated from approximately 16 mL of blood from three healthy donors that were collected in Vacutainer tubes coated with sodium heparin (BD, Heidelberg Germany) according to the manufacturer's instructions.

[0296] For transfection of human PBMCs, 100 nM of the siRNAs were reverse transfected into 1×10⁵ PBMCs with 0.3 μL Lipofectamine 2000 per well of a 96-well plate (N=2) in a total volume of 150 μL serum-free RPMI medium (ThermoFisher, cat. no. 11875) for 24 hours. Single-stranded RNA (“R-0006”) and DNA (“CpG ODN”) oligonucleotides, as well as double-stranded unmodified and 2′-O-methyl modified siRNA (“132/161”), were applied as controls.

### ANGPTL3 ELISA Assay

[0297] ANGPTL3 protein concentration was quantified in the supernatant from IC₅₀ experiments for selected siRNA concentrations by applying R&D Systems' human ANGPTL3 Quantikine ELISA kit (cat. no. DANL30). The ELISA assay was performed using 50 μl of 1:2-1:8 pre-diluted supernatant from human Hep3B cells, human primary hepatocytes, or cynomolgus primary hepatocytes according to the manufacturer's protocol. The percentage of ANGPTL3 protein expression was calculated by normalization based on the mean ANGPTL3 levels of cells treated with non-targeting siRNA control sequences.

### IFNα Determination

[0298] IFNα protein concentration was quantified in the supernatant of human PBMCs as follows: 25 μL of the cell culture supernatant was used for measurement of IFNα concentration applying a self-established electrochemiluminescence assay based on MesoScale Discovery's technology, and using a pan IFNα monoclonal capture antibody (MT1/3/5, Mabtech). Alternatively, a human IFNα2a isoform-specific assay (cat. no. K151VHK) was applied based on MesoScale's U-PLEX platform and according to the supplier's protocol.

### Cytotoxicity

[0299] siRNA cytotoxicity in human primary hepatocytes was measured 72 hours after incubation of 45,000-50,000 cells per well of a 96-well plate with 1 μM, 5 μM and 25 μM siRNA under free uptake conditions by determining the ratio of cellular viability/toxicity in each sample. Cell viability was measured by determination of the intracellular ATP content using the CellTiter-Glo assay (Promega, cat. no. G7570), and cell toxicity was measured in the supernatant using the LDH assay (Sigma, cat. no. 11644793001) according to the manufacturer's protocols. 25 μM Ketoconazole and 1% Triton X-100 were used as positive controls.

### Nuclease Stability

[0300] The GalNAc-conjugated siRNAs were tested for nuclease stability using the method described in Example 1.

### In Vivo Assay

[0301] To assess the effect of GalNAc-siRNAs targeting human ANGPTL3 in vivo, a transgene expression system based on adeno-associated viral vectors was applied in mice. To this end, an AAV8 vector with liver specific expression of mRNA, encoding human ANGPTL3 from an ApoA2 promoter (Vectalys, Toulouse, France), was administered intravenously to female C57BL/6 mice (Charles River, Germany) before siRNA dosing. GalNAc-conjugated siRNAs (including non-targeting control) were administered subcutaneously at 12 mg/kg (n=8) after serum levels of human ANGPTL3 expressed from the AAV vector reached sufficiently high serum levels. Activity of siRNAs was quantified by measuring human ANGPTL3 protein serum using ELISA.

### ANGPTL3 ELISA Assay

[0302] Serum ANGPTL3 protein levels in mice treated with siRNAs were quantified by applying R&D Systems' human ANGPTL3 Quantikine ELISA kit (cat. no. DANL30). ANGPTL3 serum levels were calculated relative to the group treated with non-targeting control siRNA.

### Results

[0303] The immune response to 11 GalNAc-siRNAs targeting ANGPTL3 (selected as described above) was measured in vitro in human primary cells by examining the production of interferon α secreted from human primary PMBCs isolated from three different healthy donors (FIG. 3) in response to transfection of the siRNAs. No signs of immune stimulation in human PBMCs were observed for any of the tested siRNAs.

[0304] The ANGPTL3 GalNAc-siRNAs were also tested for their in vitro nuclease stability in 50% murine serum by determining their relative stability and half-lives (Table 7). Half-lives ranged between <32 h and 72 h.

TABLE 7
In vitro Serum Stability

| Compound | t_{1/2} | |
|---|---|---|
| siRNA#013-c | 72 | h |
| siRNA#014-c | <32 | h |
| siRNA#015-c | 32 | h |
| siRNA#047-c | <32 | h |
| siRNA#048-c | 32 | h |
| siRNA#049-c | 32 | h |
| siRNA#050-c | 48 | h |
| siRNA#051-c | 72 | h |
| siRNA#055-c | 32 | h |
| siRNA#129-c | 48 | h |
| siRNA#142-c | 48 | h |

[0305] A cytotoxicity assay was carried out in human primary hepatocytes to exclude GalNAc-siRNAs with any toxic potential from further selection (FIG. 4). No obvious toxic effects were observed for any molecules.

[0306] Dose dependent ANGPTL3 protein knockdown was confirmed by quantification of ANGPTL3 levels in the supernatants of human primary hepatocytes treated with three different concentrations (10, 100, and 1000 nM) of the GalNAc-siRNAs (FIG. 5). Target protein reduction showed a good correlation with mRNA knock-down as quantified by qPCR (FIG. 6). This included the two GalNAc-siRNAs that did not demonstrate mRNA knock-down activity observed by qPCR, which translated to the protein level. These data confirm that successful mRNA knock-down obtained with our siRNAs reliably translates to reduction of the corresponding target protein.

[0307] Finally, three selected GalNAc-siRNA molecules were tested in vivo using the above-described humanized mouse model expressing human ANGPTL3 mRNA (FIG. 7). After subcutaneous administration of the selected compounds at 12 mg/kg, target protein levels were reduced between 75% and 90% (KDₘₐₓ) compared to animals treated with a non-targeting control. Depending on the compound, the levels returned to 50% of the maximum knock-down (KD₅₀) between ˜d20 and ˜d35 post treatment. All groups had returned to baseline by day 55.

[0308] In summary, the inventors have demonstrated successful identification of siRNAs that strongly reduce expression of human ANGPTL3 mRNA and protein translated from it in the context of GalNAc conjugates in vivo and in vitro.

### Example 5: Identification of Additional siRNAs for Inhibition of Human ANGPTL3 Expression

### Methods

[0309] The methods used were the same as those used in Example 2.

### Results

[0310] In order to identify additional siRNAs useful in targeting human ANGPTL3, the design and selection criteria as described in Example 2 were adjusted to allow 1 mismatch to M. fascicularis (cynomolgus monkey). Additionally, all siRNA sequences of interest had either greater than three mismatches to any human transcript expressed in liver other than ANGPTL3, or had two mismatches in a maximum of one human gene; sequences that did not meet one of these two criteria were filtered out. This resulted in a list of 49 additional siRNAs (see Table 1, constructs 163-211). In addition, three siRNAs were included in the analyses, which represent extended variants of siRNA #013, siRNA #014 and siRNA #015 (see Table 1, constructs 212-214).

[0311] As described above, the 52 siRNAs were produced with nucleotides having a fixed pattern (see Table 2, constructs 163-214). To test the ability of these 52 siRNAs to reduce expression of ANGPTL3, human Hep3B cells and cynomolgus primary hepatocytes were transfected with 0.1 nM or 1.0 nM of each siRNA and incubated for 48 hours. After incubation, mRNA expression of ANGPTL3 was measured in each sample and compared to cells treated with non-targeting control siRNA (FIGS. 8 and 9). 11 siRNAs that showed reduction of mRNA expression at a concentration of 1.0 nM by at least 75% in human Hep3B, or by at least 70% in cynomolgus hepatocytes, were selected for further characterization. Surprisingly, the majority of siRNAs which are active in human cells also work in cynomolgus hepatocytes, despite a single nucleotide mismatch.

[0312] IC₅₀ measurements (Table 8) and a cytotoxicity assay (FIG. 10) were carried out for the selected 11 siRNAs in human Hep3B cells. After removal of one siRNA (siRNA #173) that showed <30% of NT control Viability/Toxicity ratio (at 50 nM), four siRNAs were selected based on their human IC₅₀ values for conjugation to GalNAc (Table 8).

TABLE 8
Activity of additional selected siRNAs

| | | | Selected for |
|---|---|---|---|
| Compound | Iₘₐₓ | IC₅₀ [nM] | GalNAc conjugation |
| siRNA#165 | 0.919 | 4.19E−02 | X |
| siRNA#166 | 0.875 | 5.58E−01 | |
| siRNA#168 | 0.866 | 1.15E−01 | |
| siRNA#169 | 0.949 | 6.47E−02 | |
| siRNA#171 | 0.940 | 5.21E−03 | X |
| siRNA#172 | 0.942 | 3.99E−02 | X |
| siRNA#173 | 0.961 | 6.07E−02 | |
| siRNA#177 | 0.967 | 1.30E−01 | |
| siRNA#189 | 0.902 | 2.67E−01 | |
| siRNA#210 | 0.947 | 6.43E−02 | |
| siRNA#212 | 0.915 | 2.84E−02 | X |

[0313] Taken together, these results demonstrate the identification of siRNAs capable of potent inhibition of human and M. fascicularis ANGPTL3 mRNA expression despite a single nucleotide mismatch in M. fascicularis.

### Example 6: Identification of Active GalNAc-Conjugated siRNAs for Inhibition of Human and Cynomolgus ANGPTL3 Expression

### Methods

[0314] The methods used were the same as those used in Example 3.

### Results

[0315] Following selection of additional potent siRNAs as described in Example 5, the inventors went on to demonstrate whether the selected molecules retain their activity in the context of a GalNAc-conjugate suitable for liver specific siRNA delivery in vivo. They also assessed whether this activity holds up in cells from M. fascicularis (cynomolgus monkey), a critical pre-clinical species.

[0316] The results of the IC₅₀ measurements show that all tested siRNA conjugates retain activity when delivered by free uptake to human primary hepatocytes (Table 9; two siRNAs resulting from the first round of screening were included as references), with IC₅₀ values ranging from 1.91 to 9.68 nM. However, surprisingly, the performance ranking following free uptake of GalNAc-siRNA differs from that obtained after transfection assisted uptake of unconjugated siRNA (Table 8). This indicates again that siRNAs seem to have inherent properties based on their sequence that make them differentially suited for application in the context of GalNAc conjugates with regard to resulting knock-down potency.

TABLE 9
Iₘₐₓ and IC₅₀ of additional selected GalNAc-conjugated
siRNAs in human primary hepatocytes

| Compound | Iₘₐₓ | IC₅₀ [nM] |
|---|---|---|
| siRNA#165-c | 0.786 | 3.45 |
| siRNA#171-c | 0.904 | 1.91 |
| siRNA#172-c | 0.620 | 8.15 |
| siRNA#212-c | 0.741 | 9.68 |
| siRNA#013-c | 0.873 | 2.09 |
| siRNA#015-c | 0.846 | 1.97 |

[0317] Measured IC₅₀ activity in cynomolgus hepatocytes (Table 10) was less heterogeneous than observed in human hepatocytes (0.406 to 0.987 nM), while Iₘₐₓ was similarly variable (0.605 to 0.892 in cynomolgus vs 0.620 to 0.904 in human) but with different siRNAs showing the best Iₘₐₓ (siRNA #171-c in human, siRNA #013-c in cynomolgus).

TABLE 10
Iₘₐₓ and IC₅₀ of additional selected GalNAc-conjugated
siRNAs in cynomolgus primary hepatocytes

| Compound | Iₘₐₓ | IC₅₀ [nM] |
|---|---|---|
| siRNA#165-c | 0.719 | 9.87E−01 |
| siRNA#171-c | 0.605 | 8.48E−01 |
| siRNA#172-c | N/A | N/A |
| siRNA#212-c | 0.752 | 9.12E−01 |
| siRNA#013-c | 0.892 | 4.06E−01 |
| siRNA#015-c | 0.864 | 8.22E−01 |

N/A: No measurable activity.

[0318] These unexpected observations again highlight the requirement to use functional in vitro assays for activity quantification and molecule selection.

### Example 7: In Vitro and In Vivo Characterization of Additional GalNAc-Conjugated siRNAs for Inhibition of Human ANGPTL3 Expression

### Methods

[0319] The methods used were the same as those used in Example 4.

### Results

[0320] The immune response to four additional GalNAc-siRNAs targeting ANGPTL3 (selected as described in Example 5) was measured in vitro in human cells by examining the production of interferon α2a secreted from human primary PMBCs isolated from three different healthy donors (FIG. 11) in response to transfection of the siRNAs. No signs of immune stimulation in human PBMCs were observed for any of the tested GalNAc-siRNAs.

[0321] The additional ANGPTL3 GalNAc-siRNAs were also tested for their in vitro nuclease stability in 50% murine serum by determining their relative stability and half-lives (Table 11). Half-lives ranged between 24 h and 72 h.

TABLE 11
In vitro Serum Stability

| Compound | t_{1/2} |
|---|---|
| siRNA#165-c | 24 h |
| siRNA#171-c | 72 h |
| siRNA#172-c | 48 h |
| siRNA#212-c | 72 h |

[0322] A cytotoxicity assay was carried out in human primary hepatocytes to exclude GalNAc-siRNAs with toxic potential from further selection (FIG. 12). No obvious dose-dependent toxic effects were observed for any molecules. These results demonstrate that application of our selected siRNAs in the context of GalNAc conjugates generally does not confer cytotoxicity.

[0323] Dose dependent ANGPTL3 protein knockdown was confirmed by quantification of ANGPTL3 levels in the supernatants of human primary hepatocytes treated with three different concentrations (0.1, 1, and 1000 nM) of the GalNAc-siRNAs (FIG. 13). These data confirm that successful mRNA knock-down obtained with our GalNAc-siRNAs reliably translates to reduction of the corresponding target protein.

[0324] Finally, two additionally selected GalNAc-siRNAs were tested side-by-side with three GalNAc-siRNAs obtained in the first screening campaign (Examples 2-4) in an in vivo mouse model expressing human ANGPTL3 (FIG. 14). After subcutaneous administration of the selected compounds at 10 mg/kg, target protein levels were reduced between 60% and 80% (KDₘₐₓ) compared to animals treated with a non-targeting control. Depending on the compound, the levels returned to 50% of the maximum knock-down (KD₅₀) between ˜d20 and ˜d45 post treatment. All groups had returned to baseline by day 90.

[0325] In summary, the inventors have demonstrated the successful identification of additional siRNAs that strongly reduce expression of human ANGPTL3 mRNA and protein translated from it in the context of GalNAc conjugates in vivo and in vitro.

### Example 8: Optimization of GalNAc-Conjugated ANGPTL3 siRNA Sequences

### Methods

[0326] Production of Modified GalNAc siRNA Sequences

[0327] GalNAc siRNA sequences further optimized with modified nucleotides of formula (I) were synthesized as described in PCT Patent Publication WO 2019/170731. All oligonucleotides were synthesized on an ABI 394 synthesizer. Commercially available (Sigma Aldrich) DNA-, RNA-, 2′-OMe-RNA, and 2′-deoxy-F-RNA-phosphoramidites with standard protecting groups, e.g., 5′-O-dimethoxytrityl-thymidine-3′-O-(N,N-diisopropyl-2-cyanoethyl-phosphoramidite, 5′-O-dimethoxytrityl-2′-O-tert-butyldimethylsilyl-uracile-3′-O-(N,N-diisopropyl-2-cyanoethyl)-phosphoramidite, 5′-O-dimethoxytrityl-2′-O-tert-butyldimethylsilyl-N4-cytidine-3′-O-(N,N-diisopropyl-2-cyanoethyl)-phosphoramidite, 5′-O-dimethoxytrityl-2′-O-tert-butyldimethylsilyl-N6-benzoyl-adenosine-3′-O-(N,N-diisopropyl-2-cyanoethyl)-phosphoramidite,5′-O-dimethoxytrityl-2′-O-tert-butyldimethylsilyl-N2-isobutyryl-guanosine-3′-O-(N,N-diisopropyl-2-cyanoethyl)-phosphoramidite,5′-O-dimethoxytrityl-2′-O-methyl-uracile-3′-O-(N,N-diisopropyl-2-cyanoethyl)-phosphoramidite, 5′-O-dimethoxytrityl-2′-O-methyl-N4-cytidine-3′-O-(N,N-diisopropyl-2-cyanoethyl)-phosphoramidite, 5′-O-dimethoxytrityl-2′-O-methyl-N6-benzoyl-adenosine-3′-O-(N,N-diisopropyl-2-cyanoethyl)-phosphoramidite,5′-O-dimethoxytrityl-2′-O-methyl-N2-isobutyryl-guanosine-3′-O-(N,N-diisopropyl-2-cyanoethyl)-phosphoramidite,5′-O-dimethoxytrityl-2′-desoxy-fluoro-uracile-3′-O-(N,N-diisopropyl-2-cyanoethyl)-phosphoramidite, 5′-O-dimethoxytrityl-2′-deoxy-fluoro-N4-cytidine-3′-O-(N,N-diisopropyl-2-cyanoethyl)-phosphoramidite, 5′-O-dimethoxytrityl-2′-deoxy-fluoro-N6-benzoyl-adenosine-3′-O-(N,N-diisopropyl-2-cyanoethyl)-phosphoramidite, and 5′-O-dimethoxytrityl-2′-deoxy-fluoro-N2-isobutyryl-guanosine-3′-O-(N,N-diisopropyl-2-cyanoethyl)-phosphoramidite as well as the corresponding solid support materials (CPG-500 Å, loading 40 μmol/g, ChemGenes) were used for automated oligonucleotide synthesis.

[0328] Phosphoramidite building blocks were used as 0.1 M solutions in acetonitrile and activated with 5-(bis-3,5-trifluoromethylphenyl)-1H-tetrazole (activator 42, 0.25 M in acetonitrile, Sigma Aldrich). Reaction times of 200 s were used for standard phosphoramidite couplings. In case of phosphoramidites described herein, coupling times of 300 s were applied. As capping reagents, acetic anhydride in THF (capA for ABI, Sigma Aldrich) and N-methylimidazole in THF (capB for ABI, Sigma Aldrich) were used. As oxidizing reagent, iodine in THF/pyridine/water (0.02 M; oxidizer for ABI, Sigma Aldrich) was used. Alternatively, PS-oxidation was achieved with a 0.05 M solution of 3-((N,N-dimethyl-aminomethylidene)amino)-3H-1,2,4-dithiazole-5-thione (DDTT) in pyridine/acetonitrile (1:1). Deprotection of the DMT-protecting group was done using dichloroacetic acid in DCM (DCA deblock, Sigma Aldrich). Final cleavage from solid support and deprotection (acyl- and cyanoethyl-protecting groups) was achieved with NH₃ (32% aqueous solution/ethanol, v/v 3:1). Treatment with NMP/NEt₃/HF (3:1.5:2) was applied for TBDMS-deprotection.

[0329] Oligonucleotides with herein described building blocks at the 3′-end were synthesized on solid support materials or on universal linker-solid support (CPG-500 Å, loading 39 μmol/g, AM Chemicals LLC) and the corresponding phosphoramidites shown in Table A.

[0330] Crude products were analyzed by HPLC and single strand purification was performed using ion exchange or preparative HPLC-methods.
[0331] Ion exchange: ÄKTA purifier, (Thermo Fisher Scientific DNAPac PA200 semi prep ion exchange column, 8 μm particles, width 22 mm×length 250 mm).
[0332] Buffer A: 1.5 L H₂O, 2.107 g NaClO₄, 438 mg EDTA, 1.818 g TRIS, 540.54 g urea, pH 7.4.
[0333] Buffer B: 1.5 L H₂O, 105.34 g NaClO₄, 438 mg EDTA, 1.818 g TRIS, 40.54 g urea, pH 7.4.
[0334] Isolation of the oligonucleotides was achieved by precipitation induced by the addition of 4 volumes of ethanol and storing at −20° C.

[0335] Preparative HPLC: Agilent 1100 series prep HPLC (Waters XBridge®BEH C18 OBD™ Prep Column 130 Å, 5 μm, 10 mm×100 mm); Eluent: Triethylammonium acetate (0.1 M in acetonitrile/water). After lyophilization, the products were dissolved in 1.0 mL 2.5 M NaCl solution and 4.0 mL H₂O. The corresponding Na⁺-salts were isolated after precipitation by adding 20 mL ethanol and storing at −20° C. for 18 h.

[0336] Final analysis of the single strands was done by LC/MS-TOF methods. For double strand formation, equimolar amounts of sense strands and antisense strands were mixed in 1×PBS buffer and heated to 85° C. for 10 min. Then it was slowly cooled down to room temperature. Final analysis of the siRNA-double strands was done by LC/MS-TOF methods.

[0337] Annealing of siRNA duplexes was performed as described in Example 1. The sequences of each siRNA, including nucleotide modifications, are shown in Table 3.

siRNA Stability in Mouse Serum

[0338] Stability of optimized ANGPTL3 siRNAs listed in Table 3 was determined as described in Example 1 with the following exceptions: siRNAs were incubated at 37° C. for 0 h, 24 h, 48 h, 72 h, 96 h, and 168 h. Proteinase K was purchased from Qiagen (cat. no. 19133) and HPLC analysis was done on an Agilent Technologies 1260 Infinity II instrument using a 1260 DAD detector.

### Cell Culture and Cell-Based Assays

[0339] Human Hep3B cells, primary human hepatocytes, and primary human PBMCs were isolated and cultivated as described in Examples 2-7. Analysis of mRNA was performed as described in Example 2. Cytotoxicity was measured 72 hours after 5 nM and 50 nM siRNA transfections of human Hep3B cells as described in Example 2. IFNα protein concentration was quantified in the supernatant of human PBMCs as described in Example 4.

### In Vivo Assay

[0340] In vivo activity of modified GalNAc-ANGPTL3 siRNAs was measured in mice transduced with an AAV8 vector encoding for human ANGPTL3 mRNA from an ApoA2 promoter as described in Example 4. In contrast with Example 4, a single siRNA dose of 5 mg/kg was injected subcutaneously into 5 male C57BL/6 mice per treatment group.

### ANGPTL3 ELISA Assay

[0341] Serum ANGPTL3 protein levels in mice treated with modified GalNAc-siRNAs were quantified as described in Example 4.

### Results

[0342] 54 different siRNA modification patterns were designed and applied to three pre-selected siRNA sequences (siRNA #013, siRNA #051, and siRNA #165). Libraries of 3×54 siRNA molecules (siRNA #013-c-01 to siRNA #013-c-54, siRNA #051-c-01 to siRNA #051-c-54, and siRNA #165-c-01 to siRNA #165-c-54, Table 3) were synthesized using three consecutive modified GalNAc conjugated nucleotides at the 5′-end of respective siRNA sense strands.

[0343] All 162 modified ANGPTL3 siRNAs were tested for their nuclease stability in 50% mouse serum. As depicted in Table 12, several molecules were identified with significantly improved stability as compared to respective parent sequences with a fixed pattern of 2′O-methyl and 2′-fluoro modified nucleotides. For the constructs derived from siRNA #013-c and siRNA #051-c, the serum half-lives improved from approximately 72 h for the parental construct pattern to 168 h or more for the modified constructs. For the constructs derived from siRNA #165-c, serum half-lives improved from approximately 24 h to 96 h or more.

TABLE 12
In vitro Serum Stability

| siRNA Construct | t_{1/2} | | siRNA Construct | t1/2 | | siRNA Construct | t_{1/2} | |
|---|---|---|---|---|---|---|---|---|
| siRNA#013-c | =72 | h | siRNA#051-c | =72 | h | siRNA#165-c | =24 | h |
| siRNA#013-c-01 | >96 | h | siRNA#051-c-01 | >168 | h | siRNA#165-c-01 | >96 | h |
| siRNA#013-c-02 | >96 | h | siRNA#051-c-02 | >168 | h | siRNA#165-c-02 | >96 | h |
| siRNA#013-c-03 | >96 | h | siRNA#051-c-03 | >168 | h | siRNA#165-c-03 | >96 | h |
| siRNA#013-c-04 | >72 | h | siRNA#051-c-04 | >96 | h | siRNA#165-c-04 | >48 | h |
| siRNA#013-c-05 | >96 | h | siRNA#051-c-05 | >168 | h | siRNA#165-c-05 | >96 | h |
| siRNA#013-c-06 | >96 | h | siRNA#051-c-06 | >168 | h | siRNA#165-c-06 | >96 | h |
| siRNA#013-c-07 | >96 | h | siRNA#051-c-07 | >168 | h | siRNA#165-c-07 | >96 | h |
| siRNA#013-c-08 | >48 | h | siRNA#051-c-08 | >96 | h | siRNA#165-c-08 | >72 | h |
| siRNA#013-c-09 | >96 | h | siRNA#051-c-09 | >168 | h | siRNA#165-c-09 | =168 | h |
| siRNA#013-c-10 | >96 | h | siRNA#051-c-10 | >168 | h | siRNA#165-c-10 | =96 | h |
| siRNA#013-c-11 | >96 | h | siRNA#051-c-11 | >168 | h | siRNA#165-c-11 | >96 | h |
| siRNA#013-c-12 | >96 | h | siRNA#051-c-12 | >168 | h | siRNA#165-c-12 | >96 | h |
| siRNA#013-c-13 | >96 | h | siRNA#051-c-13 | >96 | h | siRNA#165-c-13 | =48 | h |
| siRNA#013-c-14 | >96 | h | siRNA#051-c-14 | >168 | h | siRNA#165-c-14 | >96 | h |
| siRNA#013-c-15 | >72 | h | siRNA#051-c-15 | >168 | h | siRNA#165-c-15 | >96 | h |
| siRNA#013-c-16 | >96 | h | siRNA#051-c-16 | >168 | h | siRNA#165-c-16 | >96 | h |
| siRNA#013-c-17 | =168 | h | siRNA#051-c-17 | >168 | h | siRNA#165-c-17 | =168 | h |
| siRNA#013-c-18 | >96 | h | siRNA#051-c-18 | >96 | h | siRNA#165-c-18 | >72 | h |
| siRNA#013-c-19 | >96 | h | siRNA#051-c-19 | >96 | h | siRNA#165-c-19 | >96 | h |
| siRNA#013-c-20 | >96 | h | siRNA#051-c-20 | >96 | h | siRNA#165-c-20 | >96 | h |
| siRNA#013-c-21 | =168 | h | siRNA#051-c-21 | =168 | h | siRNA#165-c-21 | >96 | h |
| siRNA#013-c-22 | =96 | h | siRNA#051-c-22 | >96 | h | siRNA#165-c-22 | =48 | h |
| siRNA#013-c-23 | >168 | h | siRNA#051-c-23 | =168 | h | siRNA#165-c-23 | =168 | h |
| siRNA#013-c-24 | >96 | h | siRNA#051-c-24 | >168 | h | siRNA#165-c-24 | >96 | h |
| siRNA#013-c-25 | >96 | h | siRNA#051-c-25 | =168 | h | siRNA#165-c-25 | >96 | h |
| siRNA#013-c-26 | =96 | h | siRNA#051-c-26 | >96 | h | siRNA#165-c-26 | =96 | h |
| siRNA#013-c-27 | >96 | h | siRNA#051-c-27 | =168 | h | siRNA#165-c-27 | >96 | h |
| siRNA#013-c-28 | >96 | h | siRNA#051-c-28 | >96 | h | siRNA#165-c-28 | >96 | h |
| siRNA#013-c-29 | >96 | h | siRNA#051-c-29 | =168 | h | siRNA#165-c-29 | >96 | h |
| siRNA#013-c-30 | >96 | h | siRNA#051-c-30 | =168 | h | siRNA#165-c-30 | >96 | h |
| siRNA#013-c-31 | =96 | h | siRNA#051-c-31 | >96 | h | siRNA#165-c-31 | >48 | h |
| siRNA#013-c-32 | >96 | h | siRNA#051-c-32 | >168 | h | siRNA#165-c-32 | >96 | h |
| siRNA#013-c-33 | >96 | h | siRNA#051-c-33 | =168 | h | siRNA#165-c-33 | =96 | h |
| siRNA#013-c-34 | =168 | h | siRNA#051-c-34 | >168 | h | siRNA#165-c-34 | >96 | h |
| siRNA#013-c-35 | =168 | h | siRNA#051-c-35 | >168 | h | siRNA#165-c-35 | >96 | h |
| siRNA#013-c-36 | =96 | h | siRNA#051-c-36 | =96 | h | siRNA#165-c-36 | =96 | h |
| siRNA#013-c-37 | >168 | h | siRNA#051-c-37 | =168 | h | siRNA#165-c-37 | >96 | h |
| siRNA#013-c-38 | >96 | h | siRNA#051-c-38 | >168 | h | siRNA#165-c-38 | >96 | h |
| siRNA#013-c-39 | =96 | h | siRNA#051-c-39 | >168 | h | siRNA#165-c-39 | >96 | h |
| siRNA#013-c-40 | =72 | h | siRNA#051-c-40 | >96 | h | siRNA#165-c-40 | =48 | h |
| siRNA#013-c-41 | >96 | h | siRNA#051-c-41 | =168 | h | siRNA#165-c-41 | >96 | h |
| siRNA#013-c-42 | =168 | h | siRNA#051-c-42 | =168 | h | siRNA#165-c-42 | >96 | h |
| siRNA#013-c-43 | >96 | h | siRNA#051-c-43 | >96 | h | siRNA#165-c-43 | >96 | h |
| siRNA#013-c-44 | =96 | h | siRNA#051-c-44 | >96 | h | siRNA#165-c-44 | =72 | h |
| siRNA#013-c-45 | >96 | h | siRNA#051-c-45 | >168 | h | siRNA#165-c-45 | >96 | h |
| siRNA#013-c-46 | >168 | h | siRNA#051-c-46 | >96 | h | siRNA#165-c-46 | >96 | h |
| siRNA#013-c-47 | >96 | h | siRNA#051-c-47 | =168 | h | siRNA#165-c-47 | >96 | h |
| siRNA#013-c-48 | >168 | h | siRNA#051-c-48 | >168 | h | siRNA#165-c-48 | >96 | h |
| siRNA#013-c-49 | =72 | h | siRNA#051-c-49 | >96 | h | siRNA#165-c-49 | >48 | h |
| siRNA#013-c-50 | =168 | h | siRNA#051-c-50 | >168 | h | siRNA#165-c-50 | >96 | h |
| siRNA#013-c-51 | >168 | h | siRNA#051-c-51 | >168 | h | siRNA#165-c-51 | >96 | h |
| siRNA#013-c-52 | >168 | h | siRNA#051-c-52 | >168 | h | siRNA#165-c-52 | >96 | h |
| siRNA#013-c-53 | >168 | h | siRNA#051-c-53 | >168 | h | siRNA#165-c-53 | >96 | h |
| siRNA#013-c-54 | >168 | h | siRNA#051-c-54 | >96 | h | siRNA#165-c-54 | >96 | h |

[0344] Next, all of the 162 modified GalNAc-siRNAs were evaluated for their knock-down potency in primary human hepatocytes under free uptake conditions and using 1 nM, 10 nM and 100 nM concentrations of the modified siRNAs. The parent constructs siRNA #013-c, siRNA #051-c, and siRNA #165-c were used as positive controls. Data are shown in FIGS. 15A-F.

[0345] Based on the in vitro knock-down activities and nuclease stability data, eight modified variants were selected for each of the three parent constructs. Prior to in vivo activity testing, the 3×8 modified constructs were investigated for their ability to stimulate innate immunity in human PBMCs (FIG. 16) and for their general cytotoxicity in human Hep3B cells (FIG. 17). In both assays, no apparent adverse effects were observed.

[0346] Finally, the 3×8 selected modified GalNAc-siRNA constructs were tested in vivo using the above-described humanized mouse model expressing human ANGPTL3 mRNA (FIG. 18 A-C). After single subcutaneous administrations of the selected compounds at a dose of 5 mg/kg, target protein levels were reduced by up to ˜95% (KDₘₐₓ) compared to animals treated with PBS. The most long-lasting optimized molecules did not yet return to 50% % of the maximum knock-down (KD₅₀) at day 63, whereas all three parent constructs exhibited <15% residual activity at that point.

[0347] In summary, the inventors have demonstrated successful identification of siRNAs that strongly reduce expression of human ANGPTL3 mRNA and protein translated from it in the context of GalNAc conjugates in vivo and in vitro. They have also demonstrated unexpectedly strong improvement of in vivo efficacy of siRNAs by introduction of optimized modification patterns using modified nucleotides. Despite a loose correlation between stability and in vitro performance, the in vivo potency of certain modified siRNAs could not be systematically predicted based on non-in vivo data.

### ANGPTL3 Sequences

| human ANGPTL3 mRNA sequence | |
|---|---|
| (SEQ ID NO: 1181) | |
| 1 | atatatagag ttaagaagtc taggtctgct tccagaagaa aacagttcca cgttgcttga |
| 61 | aattgaaaat caagataaaa atgttcacaa ttaagctcct tctttttatt gttcctctag |
| 121 | ttatttcctc cagaattgat caagacaatt catcatttga ttctctatct ccagagccaa |
| 181 | aatcaagatt tgctatgtta gacgatgtaa aaattttagc caatggcctc cttcagttgg |
| 241 | gacatggtct taaagacttt gtccataaga cgaagggcca aattaatgac atatttcaaa |
| 301 | aactcaacat atttgatcag tctttttatg atctatcgct gcaaaccagt gaaatcaaag |
| 361 | aagaagaaaa ggaactgaga agaactacat ataaactaca agtcaaaaat gaagaggtaa |
| 421 | agaatatgtc acttgaactc aactcaaaac ttgaaagcct cctagaagaa aaaattctac |
| 481 | ttcaacaaaa agtgaaatat ttagaagagc aactaactaa cttaattcaa aatcaacctg |
| 541 | aaactccaga acacccagaa gtaacttcac ttaaaacttt tgtagaaaaa caagataata |
| 601 | gcatcaaaga ccttctccag accgtggaag accaatataa acaattaaac caacagcata |
| 661 | gtcaaataaa agaaatagaa aatcagctca gaaggactag tattcaagaa cccacagaaa |
| 721 | tttctctatc ttccaagcca agagcaccaa gaactactcc ctttcttcag ttgaatgaaa |
| 781 | taagaaatgt aaaacatgat ggcattcctg ctgaatgtac caccatttat aacagaggtg |
| 841 | aacatacaag tggcatgtat gccatcagac ccagcaactc tcaagttttt catgtctact |
| 901 | gtgatgttat atcaggtagt ccatggacat taattcaaca tcgaatagat ggatcacaaa |
| 961 | acttcaatga aacgtgggag aactacaaat atggttttgg gaggcttgat ggagaatttt |
| 1021 | ggttgggcct agagaagata tactccatag tgaagcaatc taattatgtt ttacgaattg |
| 1081 | agttggaaga ctggaaagac aacaaacatt atattgaata ttctttttac ttgggaaatc |
| 1141 | acgaaaccaa ctatacgcta catctagttg cgattactgg caatgtcccc aatgcaatcc |
| 1201 | cggaaaacaa agatttggtg ttttctactt gggatcacaa agcaaaagga cacttcaact |
| 1261 | gtccagaggg ttattcagga ggctggtggt ggcatgatga gtgtggagaa aacaacctaa |
| 1321 | atggtaaata taacaaacca agagcaaaat ctaagccaga gaggagaaga ggattatctt |
| 1381 | ggaagtctca aaatggaagg ttatactcta taaaatcaac caaaatgttg atccatccaa |
| 1441 | cagattcaga aagctttgaa tgaactgagg caaatttaaa aggcaataat ttaaacatta |
| 1501 | acctcattcc aagttaatgt ggtctaataa tctggtatta aatccttaag agaaagcttg |
| 1561 | agaaatagat tttttttatc ttaaagtcac tgtctattta agattaaaca tacaatcaca |
| 1621 | taaccttaaa gaataccgtt tacatttctc aatcaaaatt cttataatac tatttgtttt |
| 1681 | aaattttgtg atgtgggaat caattttaga tggtcacaat ctagattata atcaataggt |
| 1741 | gaacttatta aataactttt ctaaataaaa aatttagaga cttttatttt aaaaggcatc |
| 1801 | atatgagcta atatcacaac tttcccagtt taaaaaacta gtactcttgt taaaactcta |
| 1861 | aacttgacta aatacagagg actggtaatt gtacagttct taaatgttgt agtattaatt |
| 1921 | tcaaaactaa aaatcgtcag cacagagtat gtgtaaaaat ctgtaataca aatttttaaa |
| 1981 | ctgatgcttc attttgctac aaaataattt ggagtaaatg tttgatatga tttatttatg |
| 2041 | aaacctaatg aagcagaatt aaatactgta ttaaaataag ttcgctgtct ttaaacaaat |
| 2101 | ggagatgact actaagtcac attgacttta acatgaggta tcactatacc ttatttgtta |
| 2161 | aaatatatac tgtatacatt ttatatattt taacacttaa tactatgaaa acaaataatt |
| 2221 | gtaaaggaat cttgtcagat tacagtaaga atgaacatat ttgtggcatc gagttaaagt |
| 2281 | ttatatttcc cctaaatatg ctgtgattct aatacattcg tgtaggtttt caagtagaaa |
| 2341 | taaacctcgt aacaagttac tgaacgttta aacagcctga caagcatgta tatatgttta |
| 2401 | aaattcaata aacaaagacc cagtccctaa attatagaaa tttaaattat tcttgcatgt |
| 2461 | ttatcgacat cacaacagat ccctaaatcc ctaaatccct aaagattaga tacaaatttt |
| 2521 | ttaccacagt atcacttgtc agaatttatt tttaaatatg attttttaaa actgccagta |
| 2581 | agaaatttta aattaaaccc atttgttaaa ggatatagtg cccaagttat atggtgacct |
| 2641 | acctttgtca atacttagca ttatgtattt caaattatcc aatatacatg tcatatatat |
| 2701 | ttttatatgt cacatatata aaagatatgt atgatctatg tgaatcctaa gtaaatattt |
| 2761 | tgttccagaa aagtacaaaa taataaaggt aaaaataatc tataattttc aggaccacag |
| 2821 | actaagctgt cgaaattaac gctgattttt ttagggccag aataccaaaa tggctcctct |
| 2881 | cttcccccaa aattggacaa tttcaaatgc aaaataattc attatttaat atatgagttg |
| 2941 | cttcctctat t |
| human ANGPTL3 polypeptide sequence | |
| (SEQ ID NO: 1182) | |
| MFTIKLLLFI VPLVISSRID QDNSSFDSLS PEPKSRFAML DDVKILANGL LQLGHGLKDF | |
| VHKTKGQIND IFQKLNIFDQ SFYDLSLQTS EIKEEEKELR RTTYKLQVKN EEVKNMSLEL | |
| NSKLESLLEE KILLQQKVKY LEEQLTNLIQ NQPETPEHPE VTSLKTFVEK QDNSIKDLLQ | |
| TVEDQYKQLN QQHSQIKEIE NQLRRTSIQE PTEISLSSKP RAPRTTPFLQ LNEIRNVKHD | |
| GIPAECTTIY NRGEHTSGMY AIRPSNSQVF HVYCDVISGS PWTLIQHRID GSQNFNETWE | |
| NYKYGFGRLD GEFWLGLEKI YSIVKQSNYV LRIELEDWKD NKHYIEYSFY LGNHETNYTL | |
| HLVAITGNVP NAIPENKDLV FSTWDHKAKG HFNCPEGYSG GWWWHDECGE NNLNGKYNKP | |
| RAKSKPERRR GLSWKSQNGR LYSIKSTKML IHPTDSESFE | |
| cynomolgus ANGPTL3 mRNA sequence | |
| (SEQ ID NO: 1183) | |
| 1 | tagagttaag aagtctaggt ctgcttccag aagaacacag ttccacgctg cttgaaattg |
| 61 | aaaatcagga taaaaatgtt cacaattaag ctccttcttt ttattgttcc tctagttatt |
| 121 | tcctccagaa ttgaccaaga caattcatca tttgattctg tatctccaga gccaaaatca |
| 181 | agatttgcta tgttagacga tgtaaaaatt ttagccaatg gcctccttca gttgggacat |
| 241 | ggtcttaaag actttgtcca taagactaag ggccaaatta atgacatatt tcaaaaactc |
| 301 | aacatatttg atcagtcttt ttatgatcta tcactgcaaa ccagtgaaat caaagaagaa |
| 361 | gaaaaggaac tgagaagaac tacatataaa ctacaagtca aaaatgaaga ggtaaagaat |
| 421 | atgtcacttg aactcaactc aaaacttgaa agcctcctag aagaaaaaat tctacttcaa |
| 481 | caaaaagtga aatatttaga agagcaacta actaacttaa ttcaaaatca acctgcaact |
| 541 | ccagaacatc cagaagtaac ttcacttaaa agttttgtag aaaaacaaga taatagcatc |
| 601 | aaagaccttc tccagactgt ggaagaacaa tataagcaat taaaccaaca gcatagtcaa |
| 661 | ataaaagaaa tagaaaatca gctcagaatg actaatattc aagaacccac agaaatttct |
| 721 | ctatcttcca agccaagagc accaagaact actccctttc ttcagctgaa tgaaataaga |
| 781 | aatgtaaaac atgatggcat tcctgctgat tgtaccacca tttacaatag aggtgaacat |
| 841 | ataagtggca cgtatgccat cagacccagc aactctcaag tttttcatgt ctactgtgat |
| 901 | gttgtatcag gtagtccatg gacattaatt caacatcgaa tagatggatc acaaaacttc |
| 961 | aatgaaacgt gggagaacta caaatatggt ttcgggaggc ttgatggaga attctggttg |
| 1021 | ggcctagaga agatatactc catagtgaag caatctaatt acgttttacg aattgagttg |
| 1081 | gaagactgga aagacaacaa acattatatt gaatattctt tttacttggg aaatcacgaa |
| 1141 | accaactata cgctacatgt agttaagatt actggcaatg tccccaatgc aatcccggaa |
| 1201 | aacaaagatt tggtgttttc tacttgggat cacaaagcaa aaggacactt cagctgtcca |
| 1261 | gagagttatt caggaggctg gtggtggcat gatgagtgtg gagaaaacaa cctaaatggt |
| 1321 | aaatataaca aaccaagaac aaaatctaag ccagagcgga gaagaggatt atcctggaag |
| 1381 | tctcaaaatg gaaggttata ctctataaaa tcaaccaaaa tgttgatcca tccaacagat |
| 1441 | tcagaaagct ttgaatgaac tgaggcaaat ttaaaaggca ataaattaaa cattaaactc |
| 1501 | attccaagtt aatgtggttt aataatctgg tattaaatcc ttaagagaag gcttgagaaa |
| 1561 | tagatttttt tatcttaaag tcactgtcaa tttaagatta aacatacaat cacataacct |
| 1621 | taaagaatac catttacatt tctcaatcaa aattcttaca acactatttg ttttatattt |
| 1681 | tgtgatgtgg gaatcaattt tagatggtcg caatctaaat tataatcaac aggtgaactt |
| 1741 | actaaataac ttttctaaat aaaaaactta gagactttaa ttttaaaagt catcatatga |
| 1801 | gctaatatca caattttccc agtttaaaaa actagttttc ttgttaaaac tctaaacttg |
| 1861 | actaaataaa gaggactgat aattatacag ttcttaaatt tgttgtaata ttaatttcaa |
| 1921 | aactaaaaat tgtcagcaca gagtatgtgt aaaaatctgt aatataaatt tttaaactga |
| 1981 | tgcctcattt tgctacaaaa taatctggag taaatttttg ataggattta tttatgaaac |
| 2041 | ctaatgaagc aggattaaat actgtattaa aataggttcg ctgtctttta aacaaatgga |
| 2101 | gatgatgatt actaagtcac attgacttta atatgaggta tcactatacc ttaacatatt |
| 2161 | tgttaaaacg tatactgtat acattttgtg tattttaata cttaatacta tgaaaacaag |
| 2221 | taattgtaaa cgtatcttgt cagattacaa taggaatgaa catattggtg acatcgagtt |
| 2281 | aaagtttata tttcccctaa atatgctgcg attccaatat attcatgtag gttttcaagc |
| 2341 | agaaataaac cttgtaacaa gttactgact aaaca |

cynomolgus ANGPTL3 polypeptide sequence
(SEQ ID NO: 1184)
MFTIKLLLFI VPLVISSRID QDNSSFDSVS PEPKSRFAML DDVKILANGL LQLGHGLKDE
VHKTKGQIND IFQKLNIFDQ SFYDLSLQTS EIKEEEKELR RTTYKLQVKN EEVKNMSLEL
NSKLESLLEE KILLQQKVKY LEEQLTNLIQ NQPATPEHPE VISLKSFVEK QDNSIKDLLQ
TVEEQYKQLN QQHSQIKEIE NQLRMTNIQE PTEISLSSKP RAPRITPFLQ LNEIRNVKHD
GIPADCITIY NRGEHISGTY AIRPSNSQVF HVYCDVVSGS PWTLIQHRID GSQNFNETWE
NYKYGFGRLD GEFWLGLEKI YSIVKQSNYV LRIELEDWKD NKHYIEYSFY LGNHETNYTL
HVVKITGNVP NAIPENKDLV FSTWDHKAKG HFSCPESYSG GWWWHDECGE NNLNGKYNKP
RTKSKPERRR GLSWKSQNGR LYSIKSTKML IHPTDSESFE

What is claimed is:

1. A double-stranded ribonucleic acid (dsRNA) that inhibits expression of a human angiopoietin-like protein 3 (ANGPTL3) gene by targeting a target sequence on an RNA transcript of the ANGPTL3 gene, wherein the dsRNA comprises a sense strand comprising a sense sequence, and an antisense strand comprising an antisense sequence, wherein the sense sequence is at least 90% identical to the target sequence, and wherein the target sequence is nucleotides 143-161, 135-153, 1535-1553, 143-163, 144-162, 145-163, 150-168, 151-169, 1528-1546, 1530-1548, 1532-1550, 1533-1551, 1602-1620, 2612-2630, or 2773-2791 of SEQ ID NO: 1181.

2. The dsRNA of claim 1, wherein the sense strand and antisense strand are complementary to each other over a region of 15-25 contiguous nucleotides.

3. The dsRNA of any one of claim 1 or 2, wherein the sense strand and the antisense strand are no more than 30 nucleotides in length.

4. The dsRNA of any one of claims 1 to 3, wherein the target sequence is nucleotides 143-161, 135-153, 1535-1553, 143-163, 144-162, 145-163, or 150-168, of SEQ ID NO: 1181.

5. The dsRNA of any one of claims 1 to 4, wherein the dsRNA comprises an antisense sequence that is at least 90% identical to a nucleotide sequence selected from the group consisting of SEQ ID NOs: 227-229, 261-265, 269, 343, 356, 379, 385, 386, and 426.

6. The dsRNA of claim 1, wherein the sense sequence and the antisense sequence are complementary, wherein:
a) the sense sequence comprises a nucleotide sequence selected from the group consisting of SEQ ID NOs: 13-15, 47-51, 55, 129, 142, 165, 171, 172, and 212; or
b) the antisense sequence comprises a nucleotide sequence selected from the group consisting of SEQ ID NOs: 227-229, 261-265, 269, 343, 356, 379, 385, 386, and 426.

7. The dsRNA of claim 6, wherein the sense strand and antisense strand of the dsRNA respectively comprise the nucleotide sequences of:
a) SEQ ID NOs: 13 and 227;
b) SEQ ID NOs: 51 and 265;
c) SEQ ID NOs: 165 and 379;
d) SEQ ID NOs: 14 and 228;
e) SEQ ID NOs: 15 and 229;
f) SEQ ID NOs: 47 and 261;
g) SEQ ID NOs: 48 and 262;
h) SEQ ID NOs: 49 and 263;
i) SEQ ID NOs: 50 and 264;
j) SEQ ID NOs: 55 and 269;
k) SEQ ID NOs: 129 and 343;
l) SEQ ID NOs: 142 and 356;
m) SEQ ID NOs: 171 and 385;
n) SEQ ID NOs: 172 and 386; or
o) SEQ ID NOs: 212 and 426.

8. The dsRNA of claim 6, wherein the sense strand and antisense strand of the dsRNA respectively comprise the nucleotide sequences of:
a) SEQ ID NOs: 13 and 227;
b) SEQ ID NOs: 51 and 265;
c) SEQ ID NOs: 165 and 379;
d) SEQ ID NOs: 14 and 228;
e) SEQ ID NOs: 15 and 229; or
f) SEQ ID NOs: 171 and 385.

9. The dsRNA of any one of claims 1 to 8, wherein the dsRNA comprises one or more modified nucleotides, wherein at least one of the one or more modified nucleotides is 2′-deoxy-2′-fluoro-ribonucleotide, 2′-deoxyribonucleotide, or 2′-O-methyl-ribonucleotide.

10. The dsRNA of any one of claims 1 to 9, wherein the dsRNA comprises an inverted 2′-deoxyribonucleotide at the 3′-end of its sense or antisense strand.

11. The dsRNA of any one of claims 1 to 10, wherein one or both of the sense strand and the antisense strand further comprise:
(a) a 5′ overhang comprising one or more nucleotides; and/or
(b) a 3′ overhang comprising one or more nucleotides.

12. The dsRNA of claim 11, wherein an overhang in the dsRNA comprises two or three nucleotides.

13. The dsRNA of claim 11 or 12, wherein an overhang in the dsRNA comprises one or more thymines.

14. The dsRNA of any one of claims 1 to 13, wherein the sense sequence and the antisense sequence comprise alternating 2′-O-methyl ribonucleotides and 2′-deoxy-2′-fluoro ribonucleotides.

15. The dsRNA of claim 1, wherein:
a) the sense strand comprises a nucleotide sequence selected from the group consisting of SEQ ID NOs: 441-443, 475-479, 483, 557, 570, 593, 599, 600, and 640; and/or
b) the antisense strand comprises a nucleotide sequence selected from the group consisting of SEQ ID NOs: 655-657, 689-693, 697, 771, 784, 807, 813, 814, and 854.

16. The dsRNA of claim 15, wherein the sense strand and antisense strand of the dsRNA respectively comprise the nucleotide sequences of:
a) SEQ ID NOs: 441 and 655;
b) SEQ ID NOs: 479 and 693;
c) SEQ ID NOs: 593 and 807;
d) SEQ ID NOs: 442 and 656;
e) SEQ ID NOs: 443 and 657;
f) SEQ ID NOs: 475 and 689;
g) SEQ ID NOs: 476 and 690;
h) SEQ ID NOs: 477 and 691;
i) SEQ ID NOs: 478 and 692;
j) SEQ ID NOs: 483 and 697;
k) SEQ ID NOs: 557 and 771;
l) SEQ ID NOs: 570 and 784;
m) SEQ ID NOs: 599 and 813;
n) SEQ ID NOs: 600 and 814; or
o) SEQ ID NOs: 640 and 854.

17. The dsRNA of any one of claims 1 to 16, wherein the dsRNA is conjugated to one or more ligands with or without a linker.

18. The dsRNA of claim 18, wherein the ligand is N-acetylgalactosamine (GalNAc) and the dsRNA is conjugated to one or more GalNAc.

19. The dsRNA of any one of claims 1 to 18, wherein the dsRNA is a small interfering RNA (siRNA).

20. The dsRNA of any one of the preceding claims, wherein one or both strands of the dsRNA comprise one or more compounds having the structure of [chemical structure]
wherein:
B is a heterocyclic nucleobase,
one of L1 and L2 is an internucleoside linking group linking the compound of formula (I) to said strand(s) and the other of L1 and L2 is H, a protecting group, a phosphorus moiety or an internucleoside linking group linking the compound of formula (I) to said strand(s),
Y is O, NH, NR1 or N—C(═O)—R1, wherein R1 is:
a (C1-C20) alkyl group, optionally substituted by one or more groups selected from an halogen atom, a (C1-C6) alkyl group, a (C3-C8) cycloalkyl group, a (C3-C14) heterocycle, a (C6-C14) aryl group, a (C5-C14) heteroaryl group, —O-Z1, —N(Z1)(Z2), —S-Z1, —CN, —C(=J)-O-Z1, —O—C(=J)-Z1, —C(=J)-N(Z1)(Z2), and —N(Z1)-C(=J)-Z2, wherein
J is O or S,
each of Z1 and Z2 is, independently, H, a (C1-C6) alkyl group, optionally substituted by one or more groups selected from a halogen atom and a (C1-C6) alkyl group,
a (C3-C8) cycloalkyl group, optionally substituted by one or more groups selected from a halogen atom and a (C1-C6) alkyl group,
a group —[C(═O)]m-R2-(O—CH₂—CH₂)p-R3, wherein
m is an integer meaning 0 or 1,
p is an integer ranging from 0 to 10,
R2 is a (C1-C20) alkylene group optionally substituted by a (C1-C6) alkyl group, —O-Z3, —N(Z3)(Z4), —S-Z3, —CN, —C(═K)—O—Z3, —O—C(═K)—Z3, —C(═K)—N(Z3)(Z4), or —N(Z3)-C(═K)—Z4,
wherein
K is O or S,
each of Z3 and Z4 is, independently, H, a (C1-C6) alkyl group, optionally substituted by one or more groups selected from a halogen atom and a (C1-C6) alkyl group,
and
R3 is selected from the group consisting of a hydrogen atom, a (C1-C6) alkyl group, a (C1-C6) alkoxy group, a (C3-C8) cycloalkyl group, a (C3-C14) heterocycle, a (C6-C14) aryl group or a (C5-C14) heteroaryl group,
or R3 is a cell targeting moiety,
X1 and X2 are each, independently, a hydrogen atom, a (C1-C6) alkyl group, and
each of Ra, Rb, Rc and Rd is, independently, H or a (C1-C6) alkyl group,
or a pharmaceutically acceptable salt thereof.

21. The dsRNA of claim 20, comprising one or more compounds of formula (I) wherein Y is
a) NR1, R1 is a non-substituted (C1-C20) alkyl group;
b) NR1, R1 is a non-substituted (C1-C16) alkyl group, which includes an alkyl group selected from a group comprising methyl, isopropyl, butyl, octyl, and hexadecyl;
c) NR1, R1 is a (C3-C8) cycloalkyl group, optionally substituted by one or more groups selected from a halogen atom and a (C1-C6) alkyl group;
d) NR1, R1 is a cyclohexyl group;
e) NR1, R1 is a (C1-C20) alkyl group substituted by a (C6-C14) aryl group;
f) NR1, R1 is a methyl group substituted by a phenyl group;
g) N—C(═O)—R1, R1 is an optionally substituted (C1-C20) alkyl group; or
h) N—C(═O)—R1, R1 is methyl or pentadecyl.

22. The dsRNA of claim 20 or 21, comprising one or more compounds of formula (I) wherein B is selected from a group consisting of a pyrimidine, a substituted pyrimidine, a purine and a substituted purine, or a pharmaceutically acceptable salt thereof.

23. The dsRNA of any one of claims 20 to 22, wherein R3 is of the formula (II): [chemical structure]
wherein A1, A2 an A3 are H,
A4 is OH or NHC(═O)—R5, wherein R5 is a (C1-C6) alkyl group, optionally substituted by a halogen atom, or a pharmaceutically acceptable salt thereof.

24. The dsRNA of any one of claims 20 to 23, wherein R3 is N-acetyl-galactosamine, or a pharmaceutically acceptable salt thereof.

25. The dsRNA of any one of claims 20 to 24, comprising one or more nucleotides from Tables A.

26. The dsRNA of claims 20 to 25, comprising from 2 to 10 compounds of formula (I), or a pharmaceutically acceptable salt thereof.

27. The dsRNA of claim 26, wherein the 2 to 10 compounds of formula (I) are on the sense strand.

28. The dsRNA of any one of claims 20 to 27, wherein the sense strand comprises two to five compounds of formula (I) at the 5′ end, and/or comprises one to three compounds of formula (I) at the 3′ end.

29. The dsRNA of claim 28, wherein
a) the two to five compounds of formula (I) at the 5′ end of the sense strand comprise lgT3 and/or lgT7, optionally comprising three consecutive lgT3 nucleotides; and/or
b) the one to three compounds of formula (I) at the 3′ end of the sense strand comprise lT4 or lT3;
optionally comprising two consecutive lT4.

30. The dsRNA of any one of claims 1 to 29, comprising one or more internucleoside linking groups independently selected from the group consisting of phosphodiester, phosphotriester, phosphorothioate, phosphorodithioate, alkyl-phosphonate and phosphoramidate backbone linking groups, or a pharmaceutically acceptable salt thereof.

31. The dsRNA of claim 1, selected from the dsRNAs in Tables 1-3.

32. The dsRNA of claim 1, wherein:
a) the sense strand comprises a nucleotide sequence selected from the group consisting of SEQ ID NOs: 858, 902, 907, 911, 915, 934, 970, 979, and 988; or
b) the antisense strand comprises a nucleotide sequence selected from the group consisting of SEQ ID NOs: 1020, 1064, 1069, 1073, 1077, 1096, 1132, 1141, and 1150.

33. The dsRNA of claim 32, wherein the sense strand and antisense strand of the dsRNA respectively comprise the nucleotide sequences of:
a) SEQ ID NOs: 858 and 1020;
b) SEQ ID NOs: 902 and 1064;
c) SEQ ID NOs: 907 and 1069;
d) SEQ ID NOs: 911 and 1073;
e) SEQ ID NOs: 915 and 1077;
f) SEQ ID NOs: 934 and 1096;
g) SEQ ID NOs: 970 and 1132;
h) SEQ ID NOs: 979 and 1141; or
i) SEQ ID NOs: 988 and 1150.

34. A pharmaceutical composition comprising the dsRNA of any one of claims 1 to 33 and a pharmaceutically acceptable excipient.

35. The dsRNA of any one of claims 1 to 33 or the composition of claim 34 for use in inhibiting ANGPTL3 expression in a human in need thereof.

36. The dsRNA or composition for use of claim 35, wherein expression of the ANGPTL3 gene in the liver of the human is inhibited by the dsRNA.

37. The dsRNA of any one of claims 1 to 36 or the composition of claim 34 for use in treating or preventing an ANGPTL3-associated condition in a human in need thereof.

38. The dsRNA or composition for use of claim 37, wherein the ANGPTL3-associated condition is a lipid metabolism disorder.

39. The dsRNA or composition for use of claim 38, wherein the lipid metabolism disorder is hypertriglyceridemia.

40. A method of treating and/or preventing one or more ANGPTL3-associated conditions comprising administering one or more dsRNAs as defined in any one of claims 1 to 33 and/or one or more pharmaceutical compositions as defined in claim 34.

The application's sequence listing, which the Patent Office published only in electronic form, follows.

SEQUENCE LISTING (1185 sequences)

SEQ ID NO: 1 - RNA, 19 nt, Artificial Sequence
  Description of Artificial Sequence: Synthetic oligonucleotide
uauauagaguuaagaaguc

SEQ ID NO: 2 - RNA, 19 nt, Artificial Sequence
  Description of Artificial Sequence: Synthetic oligonucleotide
auauagaguuaagaagucu

SEQ ID NO: 3 - RNA, 19 nt, Artificial Sequence
  Description of Artificial Sequence: Synthetic oligonucleotide
uauagaguuaagaagucua

SEQ ID NO: 4 - RNA, 19 nt, Artificial Sequence
  Description of Artificial Sequence: Synthetic oligonucleotide
aguuaagaagucuaggucu

SEQ ID NO: 5 - RNA, 19 nt, Artificial Sequence
  Description of Artificial Sequence: Synthetic oligonucleotide
guuaagaagucuaggucug

SEQ ID NO: 6 - RNA, 19 nt, Artificial Sequence
  Description of Artificial Sequence: Synthetic oligonucleotide
uuaagaagucuaggucugc

SEQ ID NO: 7 - RNA, 19 nt, Artificial Sequence
  Description of Artificial Sequence: Synthetic oligonucleotide
uaagaagucuaggucugcu

SEQ ID NO: 8 - RNA, 19 nt, Artificial Sequence
  Description of Artificial Sequence: Synthetic oligonucleotide
aagaagucuaggucugcuu

SEQ ID NO: 9 - RNA, 19 nt, Artificial Sequence
  Description of Artificial Sequence: Synthetic oligonucleotide
agaagucuaggucugcuuc

SEQ ID NO: 10 - RNA, 19 nt, Artificial Sequence
  Description of Artificial Sequence: Synthetic oligonucleotide
gaagucuaggucugcuucc

SEQ ID NO: 11 - RNA, 19 nt, Artificial Sequence
  Description of Artificial Sequence: Synthetic oligonucleotide
aagucuaggucugcuucca

SEQ ID NO: 12 - RNA, 19 nt, Artificial Sequence
  Description of Artificial Sequence: Synthetic oligonucleotide
caagacaauucaucauuug

SEQ ID NO: 13 - RNA, 19 nt, Artificial Sequence
  Description of Artificial Sequence: Synthetic oligonucleotide
agacaauucaucauuugau

SEQ ID NO: 14 - RNA, 19 nt, Artificial Sequence
  Description of Artificial Sequence: Synthetic oligonucleotide
gacaauucaucauuugauu

SEQ ID NO: 15 - RNA, 19 nt, Artificial Sequence
  Description of Artificial Sequence: Synthetic oligonucleotide
acaauucaucauuugauuc

SEQ ID NO: 16 - RNA, 19 nt, Artificial Sequence
  Description of Artificial Sequence: Synthetic oligonucleotide
gcaucaaagaccuucucca

SEQ ID NO: 17 - RNA, 19 nt, Artificial Sequence
  Description of Artificial Sequence: Synthetic oligonucleotide
auuucucuaucuuccaagc

SEQ ID NO: 18 - RNA, 19 nt, Artificial Sequence
  Description of Artificial Sequence: Synthetic oligonucleotide
ucucuaucuuccaagccaa

SEQ ID NO: 19 - RNA, 19 nt, Artificial Sequence
  Description of Artificial Sequence: Synthetic oligonucleotide
cucuaucuuccaagccaag

SEQ ID NO: 20 - RNA, 19 nt, Artificial Sequence
  Description of Artificial Sequence: Synthetic oligonucleotide
ucuaucuuccaagccaaga

SEQ ID NO: 21 - RNA, 19 nt, Artificial Sequence
  Description of Artificial Sequence: Synthetic oligonucleotide
cuaucuuccaagccaagag

SEQ ID NO: 22 - RNA, 19 nt, Artificial Sequence
  Description of Artificial Sequence: Synthetic oligonucleotide
caagaacuacucccuuucu

SEQ ID NO: 23 - RNA, 19 nt, Artificial Sequence
  Description of Artificial Sequence: Synthetic oligonucleotide
agaacuacucccuuucuuc

SEQ ID NO: 24 - RNA, 19 nt, Artificial Sequence
  Description of Artificial Sequence: Synthetic oligonucleotide
gaacuacucccuuucuuca

SEQ ID NO: 25 - RNA, 19 nt, Artificial Sequence
  Description of Artificial Sequence: Synthetic oligonucleotide
aacuacucccuuucuucag

SEQ ID NO: 26 - RNA, 19 nt, Artificial Sequence
  Description of Artificial Sequence: Synthetic oligonucleotide
aaauguaaaacaugauggc

SEQ ID NO: 27 - RNA, 19 nt, Artificial Sequence
  Description of Artificial Sequence: Synthetic oligonucleotide
aauguaaaacaugauggca

SEQ ID NO: 28 - RNA, 19 nt, Artificial Sequence
  Description of Artificial Sequence: Synthetic oligonucleotide
uaaaacaugauggcauucc

SEQ ID NO: 29 - RNA, 19 nt, Artificial Sequence
  Description of Artificial Sequence: Synthetic oligonucleotide
uuuucaugucuacugugau

SEQ ID NO: 30 - RNA, 19 nt, Artificial Sequence
  Description of Artificial Sequence: Synthetic oligonucleotide
uuucaugucuacugugaug

SEQ ID NO: 31 - RNA, 19 nt, Artificial Sequence
  Description of Artificial Sequence: Synthetic oligonucleotide
ucaugucuacugugauguu

SEQ ID NO: 32 - RNA, 19 nt, Artificial Sequence
  Description of Artificial Sequence: Synthetic oligonucleotide
guuuuacgaauugaguugg

SEQ ID NO: 33 - RNA, 19 nt, Artificial Sequence
  Description of Artificial Sequence: Synthetic oligonucleotide
uuuuacgaauugaguugga

SEQ ID NO: 34 - RNA, 19 nt, Artificial Sequence
  Description of Artificial Sequence: Synthetic oligonucleotide
cgaaaccaacuauacgcua

SEQ ID NO: 35 - RNA, 19 nt, Artificial Sequence
  Description of Artificial Sequence: Synthetic oligonucleotide
gaaaccaacuauacgcuac

SEQ ID NO: 36 - RNA, 19 nt, Artificial Sequence
  Description of Artificial Sequence: Synthetic oligonucleotide
aaaccaacuauacgcuaca

SEQ ID NO: 37 - RNA, 19 nt, Artificial Sequence
  Description of Artificial Sequence: Synthetic oligonucleotide
aaccaacuauacgcuacau

SEQ ID NO: 38 - RNA, 19 nt, Artificial Sequence
  Description of Artificial Sequence: Synthetic oligonucleotide
ucacaaagcaaaaggacac

SEQ ID NO: 39 - RNA, 19 nt, Artificial Sequence
  Description of Artificial Sequence: Synthetic oligonucleotide
guuauucaggaggcuggug

SEQ ID NO: 40 - RNA, 19 nt, Artificial Sequence
  Description of Artificial Sequence: Synthetic oligonucleotide
uuauucaggaggcuggugg

SEQ ID NO: 41 - RNA, 19 nt, Artificial Sequence
  Description of Artificial Sequence: Synthetic oligonucleotide
uauucaggaggcugguggu

SEQ ID NO: 42 - RNA, 19 nt, Artificial Sequence
  Description of Artificial Sequence: Synthetic oligonucleotide
cucauuccaaguuaaugug

SEQ ID NO: 43 - RNA, 19 nt, Artificial Sequence
  Description of Artificial Sequence: Synthetic oligonucleotide
ucauuccaaguuaaugugg

SEQ ID NO: 44 - RNA, 19 nt, Artificial Sequence
  Description of Artificial Sequence: Synthetic oligonucleotide
cauuccaaguuaauguggu

SEQ ID NO: 45 - RNA, 19 nt, Artificial Sequence
  Description of Artificial Sequence: Synthetic oligonucleotide
uaauaaucugguauuaaau

SEQ ID NO: 46 - RNA, 19 nt, Artificial Sequence
  Description of Artificial Sequence: Synthetic oligonucleotide
aauaaucugguauuaaauc

SEQ ID NO: 47 - RNA, 19 nt, Artificial Sequence
  Description of Artificial Sequence: Synthetic oligonucleotide
uaaucugguauuaaauccu

SEQ ID NO: 48 - RNA, 19 nt, Artificial Sequence
  Description of Artificial Sequence: Synthetic oligonucleotide
aucugguauuaaauccuua

SEQ ID NO: 49 - RNA, 19 nt, Artificial Sequence
  Description of Artificial Sequence: Synthetic oligonucleotide
cugguauuaaauccuuaag

SEQ ID NO: 50 - RNA, 19 nt, Artificial Sequence
  Description of Artificial Sequence: Synthetic oligonucleotide
ugguauuaaauccuuaaga

SEQ ID NO: 51 - RNA, 19 nt, Artificial Sequence
  Description of Artificial Sequence: Synthetic oligonucleotide
guauuaaauccuuaagaga

SEQ ID NO: 52 - RNA, 19 nt, Artificial Sequence
  Description of Artificial Sequence: Synthetic oligonucleotide
auuuaagauuaaacauaca

SEQ ID NO: 53 - RNA, 19 nt, Artificial Sequence
  Description of Artificial Sequence: Synthetic oligonucleotide
aagauuaaacauacaauca

SEQ ID NO: 54 - RNA, 19 nt, Artificial Sequence
  Description of Artificial Sequence: Synthetic oligonucleotide
agauuaaacauacaaucac

SEQ ID NO: 55 - RNA, 19 nt, Artificial Sequence
  Description of Artificial Sequence: Synthetic oligonucleotide
gauuaaacauacaaucaca

SEQ ID NO: 56 - RNA, 19 nt, Artificial Sequence
  Description of Artificial Sequence: Synthetic oligonucleotide
aaacauacaaucacauaac

SEQ ID NO: 57 - RNA, 19 nt, Artificial Sequence
  Description of Artificial Sequence: Synthetic oligonucleotide
aacauacaaucacauaacc

SEQ ID NO: 58 - RNA, 19 nt, Artificial Sequence
  Description of Artificial Sequence: Synthetic oligonucleotide
acauacaaucacauaaccu

SEQ ID NO: 59 - RNA, 19 nt, Artificial Sequence
  Description of Artificial Sequence: Synthetic oligonucleotide
auacaaucacauaaccuua

SEQ ID NO: 60 - RNA, 19 nt, Artificial Sequence
  Description of Artificial Sequence: Synthetic oligonucleotide
acaaucacauaaccuuaaa

SEQ ID NO: 61 - RNA, 19 nt, Artificial Sequence
  Description of Artificial Sequence: Synthetic oligonucleotide
caaucacauaaccuuaaag

SEQ ID NO: 62 - RNA, 19 nt, Artificial Sequence
  Description of Artificial Sequence: Synthetic oligonucleotide
aaucacauaaccuuaaaga

SEQ ID NO: 63 - RNA, 19 nt, Artificial Sequence
  Description of Artificial Sequence: Synthetic oligonucleotide
aucacauaaccuuaaagaa

SEQ ID NO: 64 - RNA, 19 nt, Artificial Sequence
  Description of Artificial Sequence: Synthetic oligonucleotide
ucacauaaccuuaaagaau

SEQ ID NO: 65 - RNA, 19 nt, Artificial Sequence
  Description of Artificial Sequence: Synthetic oligonucleotide
cacauaaccuuaaagaaua

SEQ ID NO: 66 - RNA, 19 nt, Artificial Sequence
  Description of Artificial Sequence: Synthetic oligonucleotide
acauaaccuuaaagaauac

SEQ ID NO: 67 - RNA, 19 nt, Artificial Sequence
  Description of Artificial Sequence: Synthetic oligonucleotide
cauaaccuuaaagaauacc

SEQ ID NO: 68 - RNA, 19 nt, Artificial Sequence
  Description of Artificial Sequence: Synthetic oligonucleotide
cauuucucaaucaaaauuc

SEQ ID NO: 69 - RNA, 19 nt, Artificial Sequence
  Description of Artificial Sequence: Synthetic oligonucleotide
uucucaaucaaaauucuua

SEQ ID NO: 70 - RNA, 19 nt, Artificial Sequence
  Description of Artificial Sequence: Synthetic oligonucleotide
auuuugugaugugggaauc

SEQ ID NO: 71 - RNA, 19 nt, Artificial Sequence
  Description of Artificial Sequence: Synthetic oligonucleotide
uuuugugaugugggaauca

SEQ ID NO: 72 - RNA, 19 nt, Artificial Sequence
  Description of Artificial Sequence: Synthetic oligonucleotide
uuugugaugugggaaucaa

SEQ ID NO: 73 - RNA, 19 nt, Artificial Sequence
  Description of Artificial Sequence: Synthetic oligonucleotide
uugugaugugggaaucaau

SEQ ID NO: 74 - RNA, 19 nt, Artificial Sequence
  Description of Artificial Sequence: Synthetic oligonucleotide
ugugaugugggaaucaauu

SEQ ID NO: 75 - RNA, 19 nt, Artificial Sequence
  Description of Artificial Sequence: Synthetic oligonucleotide
gugaugugggaaucaauuu

SEQ ID NO: 76 - RNA, 19 nt, Artificial Sequence
  Description of Artificial Sequence: Synthetic oligonucleotide
ugaugugggaaucaauuuu

SEQ ID NO: 77 - RNA, 19 nt, Artificial Sequence
  Description of Artificial Sequence: Synthetic oligonucleotide
gaugugggaaucaauuuua

SEQ ID NO: 78 - RNA, 19 nt, Artificial Sequence
  Description of Artificial Sequence: Synthetic oligonucleotide
augugggaaucaauuuuag

SEQ ID NO: 79 - RNA, 19 nt, Artificial Sequence
  Description of Artificial Sequence: Synthetic oligonucleotide
ugugggaaucaauuuuaga

SEQ ID NO: 80 - RNA, 19 nt, Artificial Sequence
  Description of Artificial Sequence: Synthetic oligonucleotide
gugggaaucaauuuuagau

SEQ ID NO: 81 - RNA, 19 nt, Artificial Sequence
  Description of Artificial Sequence: Synthetic oligonucleotide
ugggaaucaauuuuagaug

SEQ ID NO: 82 - RNA, 19 nt, Artificial Sequence
  Description of Artificial Sequence: Synthetic oligonucleotide
gggaaucaauuuuagaugg

SEQ ID NO: 83 - RNA, 19 nt, Artificial Sequence
  Description of Artificial Sequence: Synthetic oligonucleotide
ggaaucaauuuuagauggu

SEQ ID NO: 84 - RNA, 19 nt, Artificial Sequence
  Description of Artificial Sequence: Synthetic oligonucleotide
gaaucaauuuuagaugguc

SEQ ID NO: 85 - RNA, 19 nt, Artificial Sequence
  Description of Artificial Sequence: Synthetic oligonucleotide
caucauaugagcuaauauc

SEQ ID NO: 86 - RNA, 19 nt, Artificial Sequence
  Description of Artificial Sequence: Synthetic oligonucleotide
aucauaugagcuaauauca

SEQ ID NO: 87 - RNA, 19 nt, Artificial Sequence
  Description of Artificial Sequence: Synthetic oligonucleotide
ucauaugagcuaauaucac

SEQ ID NO: 88 - RNA, 19 nt, Artificial Sequence
  Description of Artificial Sequence: Synthetic oligonucleotide
cauaugagcuaauaucaca

SEQ ID NO: 89 - RNA, 19 nt, Artificial Sequence
  Description of Artificial Sequence: Synthetic oligonucleotide
auaugagcuaauaucacaa

SEQ ID NO: 90 - RNA, 19 nt, Artificial Sequence
  Description of Artificial Sequence: Synthetic oligonucleotide
cccaguuuaaaaaacuagu

SEQ ID NO: 91 - RNA, 19 nt, Artificial Sequence
  Description of Artificial Sequence: Synthetic oligonucleotide
uaaaacucuaaacuugacu

SEQ ID NO: 92 - RNA, 19 nt, Artificial Sequence
  Description of Artificial Sequence: Synthetic oligonucleotide
aaaacucuaaacuugacua

SEQ ID NO: 93 - RNA, 19 nt, Artificial Sequence
  Description of Artificial Sequence: Synthetic oligonucleotide
aaacucuaaacuugacuaa

SEQ ID NO: 94 - RNA, 19 nt, Artificial Sequence
  Description of Artificial Sequence: Synthetic oligonucleotide
acucuaaacuugacuaaau

SEQ ID NO: 95 - RNA, 19 nt, Artificial Sequence
  Description of Artificial Sequence: Synthetic oligonucleotide
cucuaaacuugacuaaaua

SEQ ID NO: 96 - RNA, 19 nt, Artificial Sequence
  Description of Artificial Sequence: Synthetic oligonucleotide
gucagcacagaguaugugu

SEQ ID NO: 97 - RNA, 19 nt, Artificial Sequence
  Description of Artificial Sequence: Synthetic oligonucleotide
gauuuauuuaugaaaccua

SEQ ID NO: 98 - RNA, 19 nt, Artificial Sequence
  Description of Artificial Sequence: Synthetic oligonucleotide
auuuaugaaaccuaaugaa

SEQ ID NO: 99 - RNA, 19 nt, Artificial Sequence
  Description of Artificial Sequence: Synthetic oligonucleotide
uuuaugaaaccuaaugaag

SEQ ID NO: 100 - RNA, 19 nt, Artificial Sequence
  Description of Artificial Sequence: Synthetic oligonucleotide
uaugaaaccuaaugaagca

SEQ ID NO: 101 - RNA, 19 nt, Artificial Sequence
  Description of Artificial Sequence: Synthetic oligonucleotide
augaaaccuaaugaagcag

SEQ ID NO: 102 - RNA, 19 nt, Artificial Sequence
  Description of Artificial Sequence: Synthetic oligonucleotide
uacuaagucacauugacuu

SEQ ID NO: 103 - RNA, 19 nt, Artificial Sequence
  Description of Artificial Sequence: Synthetic oligonucleotide
acuaagucacauugacuuu

SEQ ID NO: 104 - RNA, 19 nt, Artificial Sequence
  Description of Artificial Sequence: Synthetic oligonucleotide
cuaagucacauugacuuua

SEQ ID NO: 105 - RNA, 19 nt, Artificial Sequence
  Description of Artificial Sequence: Synthetic oligonucleotide
uaagucacauugacuuuaa

SEQ ID NO: 106 - RNA, 19 nt, Artificial Sequence
  Description of Artificial Sequence: Synthetic oligonucleotide
gagguaucacuauaccuua

SEQ ID NO: 107 - RNA, 19 nt, Artificial Sequence
  Description of Artificial Sequence: Synthetic oligonucleotide
cuuaauacuaugaaaacaa

SEQ ID NO: 108 - RNA, 19 nt, Artificial Sequence
  Description of Artificial Sequence: Synthetic oligonucleotide
caucgaguuaaaguuuaua

SEQ ID NO: 109 - RNA, 19 nt, Artificial Sequence
  Description of Artificial Sequence: Synthetic oligonucleotide
aucgaguuaaaguuuauau

SEQ ID NO: 110 - RNA, 19 nt, Artificial Sequence
  Description of Artificial Sequence: Synthetic oligonucleotide
ucgaguuaaaguuuauauu

SEQ ID NO: 111 - RNA, 19 nt, Artificial Sequence
  Description of Artificial Sequence: Synthetic oligonucleotide
cgaguuaaaguuuauauuu

SEQ ID NO: 112 - RNA, 19 nt, Artificial Sequence
  Description of Artificial Sequence: Synthetic oligonucleotide
aaguuuauauuuccccuaa

SEQ ID NO: 113 - RNA, 19 nt, Artificial Sequence
  Description of Artificial Sequence: Synthetic oligonucleotide
aguuuauauuuccccuaaa

SEQ ID NO: 114 - RNA, 19 nt, Artificial Sequence
  Description of Artificial Sequence: Synthetic oligonucleotide
auuuccccuaaauaugcug

SEQ ID NO: 115 - RNA, 19 nt, Artificial Sequence
  Description of Artificial Sequence: Synthetic oligonucleotide
cccuaaaucccuaaagauu

SEQ ID NO: 116 - RNA, 19 nt, Artificial Sequence
  Description of Artificial Sequence: Synthetic oligonucleotide
ccuaaaucccuaaagauua

SEQ ID NO: 117 - RNA, 19 nt, Artificial Sequence
  Description of Artificial Sequence: Synthetic oligonucleotide
cuaaaucccuaaagauuag

SEQ ID NO: 118 - RNA, 19 nt, Artificial Sequence
  Description of Artificial Sequence: Synthetic oligonucleotide
uaaaucccuaaagauuaga

SEQ ID NO: 119 - RNA, 19 nt, Artificial Sequence
  Description of Artificial Sequence: Synthetic oligonucleotide
aaaucccuaaagauuagau

SEQ ID NO: 120 - RNA, 19 nt, Artificial Sequence
  Description of Artificial Sequence: Synthetic oligonucleotide
uuaaacccauuuguuaaag

SEQ ID NO: 121 - RNA, 19 nt, Artificial Sequence
  Description of Artificial Sequence: Synthetic oligonucleotide
uuuguuaaaggauauagug

SEQ ID NO: 122 - RNA, 19 nt, Artificial Sequence
  Description of Artificial Sequence: Synthetic oligonucleotide
uuguuaaaggauauagugc

SEQ ID NO: 123 - RNA, 19 nt, Artificial Sequence
  Description of Artificial Sequence: Synthetic oligonucleotide
uguuaaaggauauagugcc

SEQ ID NO: 124 - RNA, 19 nt, Artificial Sequence
  Description of Artificial Sequence: Synthetic oligonucleotide
guuaaaggauauagugccc

SEQ ID NO: 125 - RNA, 19 nt, Artificial Sequence
  Description of Artificial Sequence: Synthetic oligonucleotide
uuaaaggauauagugccca

SEQ ID NO: 126 - RNA, 19 nt, Artificial Sequence
  Description of Artificial Sequence: Synthetic oligonucleotide
uaaaggauauagugcccaa

SEQ ID NO: 127 - RNA, 19 nt, Artificial Sequence
  Description of Artificial Sequence: Synthetic oligonucleotide
aggauauagugcccaaguu

SEQ ID NO: 128 - RNA, 19 nt, Artificial Sequence
  Description of Artificial Sequence: Synthetic oligonucleotide
ggauauagugcccaaguua

SEQ ID NO: 129 - RNA, 19 nt, Artificial Sequence
  Description of Artificial Sequence: Synthetic oligonucleotide
gauauagugcccaaguuau

SEQ ID NO: 130 - RNA, 19 nt, Artificial Sequence
  Description of Artificial Sequence: Synthetic oligonucleotide
auauagugcccaaguuaua

SEQ ID NO: 131 - RNA, 19 nt, Artificial Sequence
  Description of Artificial Sequence: Synthetic oligonucleotide
ggugaccuaccuuugucaa

SEQ ID NO: 132 - RNA, 19 nt, Artificial Sequence
  Description of Artificial Sequence: Synthetic oligonucleotide
gugaccuaccuuugucaau

SEQ ID NO: 133 - RNA, 19 nt, Artificial Sequence
  Description of Artificial Sequence: Synthetic oligonucleotide
ugaccuaccuuugucaaua

SEQ ID NO: 134 - RNA, 19 nt, Artificial Sequence
  Description of Artificial Sequence: Synthetic oligonucleotide
auguauuucaaauuaucca

SEQ ID NO: 135 - RNA, 19 nt, Artificial Sequence
  Description of Artificial Sequence: Synthetic oligonucleotide
uucaaauuauccaauauac

SEQ ID NO: 136 - RNA, 19 nt, Artificial Sequence
  Description of Artificial Sequence: Synthetic oligonucleotide
ucaaauuauccaauauaca

SEQ ID NO: 137 - RNA, 19 nt, Artificial Sequence
  Description of Artificial Sequence: Synthetic oligonucleotide
auuauccaauauacauguc

SEQ ID NO: 138 - RNA, 19 nt, Artificial Sequence
  Description of Artificial Sequence: Synthetic oligonucleotide
uuauccaauauacauguca

SEQ ID NO: 139 - RNA, 19 nt, Artificial Sequence
  Description of Artificial Sequence: Synthetic oligonucleotide
uauccaauauacaugucau

SEQ ID NO: 140 - RNA, 19 nt, Artificial Sequence
  Description of Artificial Sequence: Synthetic oligonucleotide
caugucauauauauuuuua

SEQ ID NO: 141 - RNA, 19 nt, Artificial Sequence
  Description of Artificial Sequence: Synthetic oligonucleotide
aguacaaaauaauaaaggu

SEQ ID NO: 142 - RNA, 19 nt, Artificial Sequence
  Description of Artificial Sequence: Synthetic oligonucleotide
guacaaaauaauaaaggua

SEQ ID NO: 143 - RNA, 19 nt, Artificial Sequence
  Description of Artificial Sequence: Synthetic oligonucleotide
auaauuuucaggaccacag

SEQ ID NO: 144 - RNA, 19 nt, Artificial Sequence
  Description of Artificial Sequence: Synthetic oligonucleotide
aauuuucaggaccacagac

SEQ ID NO: 145 - RNA, 19 nt, Artificial Sequence
  Description of Artificial Sequence: Synthetic oligonucleotide
uuuucaggaccacagacua

SEQ ID NO: 146 - RNA, 19 nt, Artificial Sequence
  Description of Artificial Sequence: Synthetic oligonucleotide
uuucaggaccacagacuaa

SEQ ID NO: 147 - RNA, 19 nt, Artificial Sequence
  Description of Artificial Sequence: Synthetic oligonucleotide
uucaggaccacagacuaag

SEQ ID NO: 148 - RNA, 19 nt, Artificial Sequence
  Description of Artificial Sequence: Synthetic oligonucleotide
ucaggaccacagacuaagc

SEQ ID NO: 149 - RNA, 19 nt, Artificial Sequence
  Description of Artificial Sequence: Synthetic oligonucleotide
aggaccacagacuaagcug

SEQ ID NO: 150 - RNA, 19 nt, Artificial Sequence
  Description of Artificial Sequence: Synthetic oligonucleotide
ggaccacagacuaagcugu

SEQ ID NO: 151 - RNA, 19 nt, Artificial Sequence
  Description of Artificial Sequence: Synthetic oligonucleotide
gaccacagacuaagcuguc

SEQ ID NO: 152 - RNA, 19 nt, Artificial Sequence
  Description of Artificial Sequence: Synthetic oligonucleotide
uuuuuuagggccagaauac

SEQ ID NO: 153 - RNA, 19 nt, Artificial Sequence
  Description of Artificial Sequence: Synthetic oligonucleotide
uuuuuagggccagaauacc

SEQ ID NO: 154 - RNA, 19 nt, Artificial Sequence
  Description of Artificial Sequence: Synthetic oligonucleotide
uuuuagggccagaauacca

SEQ ID NO: 155 - RNA, 19 nt, Artificial Sequence
  Description of Artificial Sequence: Synthetic oligonucleotide
uuuagggccagaauaccaa

SEQ ID NO: 156 - RNA, 19 nt, Artificial Sequence
  Description of Artificial Sequence: Synthetic oligonucleotide
uuagggccagaauaccaaa

SEQ ID NO: 157 - RNA, 19 nt, Artificial Sequence
  Description of Artificial Sequence: Synthetic oligonucleotide
uagggccagaauaccaaaa

SEQ ID NO: 158 - RNA, 19 nt, Artificial Sequence
  Description of Artificial Sequence: Synthetic oligonucleotide
agggccagaauaccaaaau

SEQ ID NO: 159 - RNA, 19 nt, Artificial Sequence
  Description of Artificial Sequence: Synthetic oligonucleotide
aaauuggacaauuucaaau

SEQ ID NO: 160 - RNA, 19 nt, Artificial Sequence
  Description of Artificial Sequence: Synthetic oligonucleotide
auuggacaauuucaaaugc

SEQ ID NO: 161 - RNA, 19 nt, Artificial Sequence
  Description of Artificial Sequence: Synthetic oligonucleotide
uuggacaauuucaaaugca

SEQ ID NO: 162 - RNA, 19 nt, Artificial Sequence
  Description of Artificial Sequence: Synthetic oligonucleotide
uuaauauaugaguugcuuc

SEQ ID NO: 163 - RNA, 19 nt, Artificial Sequence
  Description of Artificial Sequence: Synthetic oligonucleotide
gaauugaucaagacaauuc

SEQ ID NO: 164 - RNA, 19 nt, Artificial Sequence
  Description of Artificial Sequence: Synthetic oligonucleotide
aauugaucaagacaauuca

SEQ ID NO: 165 - RNA, 19 nt, Artificial Sequence
  Description of Artificial Sequence: Synthetic oligonucleotide
auugaucaagacaauucau

SEQ ID NO: 166 - RNA, 19 nt, Artificial Sequence
  Description of Artificial Sequence: Synthetic oligonucleotide
uugaucaagacaauucauc

SEQ ID NO: 167 - RNA, 19 nt, Artificial Sequence
  Description of Artificial Sequence: Synthetic oligonucleotide
ugaucaagacaauucauca

SEQ ID NO: 168 - RNA, 19 nt, Artificial Sequence
  Description of Artificial Sequence: Synthetic oligonucleotide
gaucaagacaauucaucau

SEQ ID NO: 169 - RNA, 19 nt, Artificial Sequence
  Description of Artificial Sequence: Synthetic oligonucleotide
aucaagacaauucaucauu

SEQ ID NO: 170 - RNA, 19 nt, Artificial Sequence
  Description of Artificial Sequence: Synthetic oligonucleotide
ucaagacaauucaucauuu

SEQ ID NO: 171 - RNA, 19 nt, Artificial Sequence
  Description of Artificial Sequence: Synthetic oligonucleotide
ucaucauuugauucucuau

SEQ ID NO: 172 - RNA, 19 nt, Artificial Sequence
  Description of Artificial Sequence: Synthetic oligonucleotide
caucauuugauucucuauc

SEQ ID NO: 173 - RNA, 19 nt, Artificial Sequence
  Description of Artificial Sequence: Synthetic oligonucleotide
aucauuugauucucuaucu

SEQ ID NO: 174 - RNA, 19 nt, Artificial Sequence
  Description of Artificial Sequence: Synthetic oligonucleotide
uagaaaaucagcucagaag

SEQ ID NO: 175 - RNA, 19 nt, Artificial Sequence
  Description of Artificial Sequence: Synthetic oligonucleotide
gaaaaucagcucagaagga

SEQ ID NO: 176 - RNA, 19 nt, Artificial Sequence
  Description of Artificial Sequence: Synthetic oligonucleotide
aaaaucagcucagaaggac

SEQ ID NO: 177 - RNA, 19 nt, Artificial Sequence
  Description of Artificial Sequence: Synthetic oligonucleotide
aaaucagcucagaaggacu

SEQ ID NO: 178 - RNA, 19 nt, Artificial Sequence
  Description of Artificial Sequence: Synthetic oligonucleotide
aaucagcucagaaggacua

SEQ ID NO: 179 - RNA, 19 nt, Artificial Sequence
  Description of Artificial Sequence: Synthetic oligonucleotide
gauggcauuccugcugaau

SEQ ID NO: 180 - RNA, 19 nt, Artificial Sequence
  Description of Artificial Sequence: Synthetic oligonucleotide
cauuccugcugaauguacc

SEQ ID NO: 181 - RNA, 19 nt, Artificial Sequence
  Description of Artificial Sequence: Synthetic oligonucleotide
uccugcugaauguaccacc

SEQ ID NO: 182 - RNA, 19 nt, Artificial Sequence
  Description of Artificial Sequence: Synthetic oligonucleotide
cugcugaauguaccaccau

SEQ ID NO: 183 - RNA, 19 nt, Artificial Sequence
  Description of Artificial Sequence: Synthetic oligonucleotide
ugcugaauguaccaccauu

SEQ ID NO: 184 - RNA, 19 nt, Artificial Sequence
  Description of Artificial Sequence: Synthetic oligonucleotide
gcugaauguaccaccauuu

SEQ ID NO: 185 - RNA, 19 nt, Artificial Sequence
  Description of Artificial Sequence: Synthetic oligonucleotide
cugaauguaccaccauuua

SEQ ID NO: 186 - RNA, 19 nt, Artificial Sequence
  Description of Artificial Sequence: Synthetic oligonucleotide
agaggugaacauacaagug

SEQ ID NO: 187 - RNA, 19 nt, Artificial Sequence
  Description of Artificial Sequence: Synthetic oligonucleotide
gaggugaacauacaagugg

SEQ ID NO: 188 - RNA, 19 nt, Artificial Sequence
  Description of Artificial Sequence: Synthetic oligonucleotide
aggugaacauacaaguggc

SEQ ID NO: 189 - RNA, 19 nt, Artificial Sequence
  Description of Artificial Sequence: Synthetic oligonucleotide
ggugaacauacaaguggca

SEQ ID NO: 190 - RNA, 19 nt, Artificial Sequence
  Description of Artificial Sequence: Synthetic oligonucleotide
aaguggcauguaugccauc

SEQ ID NO: 191 - RNA, 19 nt, Artificial Sequence
  Description of Artificial Sequence: Synthetic oligonucleotide
aguggcauguaugccauca

SEQ ID NO: 192 - RNA, 19 nt, Artificial Sequence
  Description of Artificial Sequence: Synthetic oligonucleotide
guggcauguaugccaucag

SEQ ID NO: 193 - RNA, 19 nt, Artificial Sequence
  Description of Artificial Sequence: Synthetic oligonucleotide
uggcauguaugccaucaga

SEQ ID NO: 194 - RNA, 19 nt, Artificial Sequence
  Description of Artificial Sequence: Synthetic oligonucleotide
cuauacgcuacaucuaguu

SEQ ID NO: 195 - RNA, 19 nt, Artificial Sequence
  Description of Artificial Sequence: Synthetic oligonucleotide
caaaaggacacuucaacug

SEQ ID NO: 196 - RNA, 19 nt, Artificial Sequence
  Description of Artificial Sequence: Synthetic oligonucleotide
aaaaggacacuucaacugu

SEQ ID NO: 197 - RNA, 19 nt, Artificial Sequence
  Description of Artificial Sequence: Synthetic oligonucleotide
aaaggacacuucaacuguc

SEQ ID NO: 198 - RNA, 19 nt, Artificial Sequence
  Description of Artificial Sequence: Synthetic oligonucleotide
aaggacacuucaacugucc

SEQ ID NO: 199 - RNA, 19 nt, Artificial Sequence
  Description of Artificial Sequence: Synthetic oligonucleotide
aggacacuucaacugucca

SEQ ID NO: 200 - RNA, 19 nt, Artificial Sequence
  Description of Artificial Sequence: Synthetic oligonucleotide
ggacacuucaacuguccag

SEQ ID NO: 201 - RNA, 19 nt, Artificial Sequence
  Description of Artificial Sequence: Synthetic oligonucleotide
guccagaggguuauucagg

SEQ ID NO: 202 - RNA, 19 nt, Artificial Sequence
  Description of Artificial Sequence: Synthetic oligonucleotide
uccagaggguuauucagga

SEQ ID NO: 203 - RNA, 19 nt, Artificial Sequence
  Description of Artificial Sequence: Synthetic oligonucleotide
ccagaggguuauucaggag

SEQ ID NO: 204 - RNA, 19 nt, Artificial Sequence
  Description of Artificial Sequence: Synthetic oligonucleotide
cagaggguuauucaggagg

SEQ ID NO: 205 - RNA, 19 nt, Artificial Sequence
  Description of Artificial Sequence: Synthetic oligonucleotide
agaggguuauucaggaggc

SEQ ID NO: 206 - RNA, 19 nt, Artificial Sequence
  Description of Artificial Sequence: Synthetic oligonucleotide
gaggguuauucaggaggcu

SEQ ID NO: 207 - RNA, 19 nt, Artificial Sequence
  Description of Artificial Sequence: Synthetic oligonucleotide
aggguuauucaggaggcug

SEQ ID NO: 208 - RNA, 19 nt, Artificial Sequence
  Description of Artificial Sequence: Synthetic oligonucleotide
gguuauucaggaggcuggu

SEQ ID NO: 209 - RNA, 19 nt, Artificial Sequence
  Description of Artificial Sequence: Synthetic oligonucleotide
aagaggauuaucuuggaag

SEQ ID NO: 210 - RNA, 19 nt, Artificial Sequence
  Description of Artificial Sequence: Synthetic oligonucleotide
agaggauuaucuuggaagu

SEQ ID NO: 211 - RNA, 19 nt, Artificial Sequence
  Description of Artificial Sequence: Synthetic oligonucleotide
gaggauuaucuuggaaguc

SEQ ID NO: 212 - RNA, 21 nt, Artificial Sequence
  Description of Artificial Sequence: Synthetic oligonucleotide
agacaauucaucauuugauuc

SEQ ID NO: 213 - RNA, 20 nt, Artificial Sequence
  Description of Artificial Sequence: Synthetic oligonucleotide
agacaauucaucauuugauu

SEQ ID NO: 214 - RNA, 20 nt, Artificial Sequence
  Description of Artificial Sequence: Synthetic oligonucleotide
aaucaaaugaugaauugucu

SEQ ID NO: 215 - RNA, 19 nt, Artificial Sequence
  Description of Artificial Sequence: Synthetic oligonucleotide
gacuucuuaacucuauaua

SEQ ID NO: 216 - RNA, 19 nt, Artificial Sequence
  Description of Artificial Sequence: Synthetic oligonucleotide
agacuucuuaacucuauau

SEQ ID NO: 217 - RNA, 19 nt, Artificial Sequence
  Description of Artificial Sequence: Synthetic oligonucleotide
uagacuucuuaacucuaua

SEQ ID NO: 218 - RNA, 19 nt, Artificial Sequence
  Description of Artificial Sequence: Synthetic oligonucleotide
agaccuagacuucuuaacu

SEQ ID NO: 219 - RNA, 19 nt, Artificial Sequence
  Description of Artificial Sequence: Synthetic oligonucleotide
cagaccuagacuucuuaac

SEQ ID NO: 220 - RNA, 19 nt, Artificial Sequence
  Description of Artificial Sequence: Synthetic oligonucleotide
gcagaccuagacuucuuaa

SEQ ID NO: 221 - RNA, 19 nt, Artificial Sequence
  Description of Artificial Sequence: Synthetic oligonucleotide
agcagaccuagacuucuua

SEQ ID NO: 222 - RNA, 19 nt, Artificial Sequence
  Description of Artificial Sequence: Synthetic oligonucleotide
aagcagaccuagacuucuu

SEQ ID NO: 223 - RNA, 19 nt, Artificial Sequence
  Description of Artificial Sequence: Synthetic oligonucleotide
gaagcagaccuagacuucu

SEQ ID NO: 224 - RNA, 19 nt, Artificial Sequence
  Description of Artificial Sequence: Synthetic oligonucleotide
ggaagcagaccuagacuuc

SEQ ID NO: 225 - RNA, 19 nt, Artificial Sequence
  Description of Artificial Sequence: Synthetic oligonucleotide
uggaagcagaccuagacuu

SEQ ID NO: 226 - RNA, 19 nt, Artificial Sequence
  Description of Artificial Sequence: Synthetic oligonucleotide
caaaugaugaauugucuug

SEQ ID NO: 227 - RNA, 19 nt, Artificial Sequence
  Description of Artificial Sequence: Synthetic oligonucleotide
aucaaaugaugaauugucu

SEQ ID NO: 228 - RNA, 19 nt, Artificial Sequence
  Description of Artificial Sequence: Synthetic oligonucleotide
aaucaaaugaugaauuguc

SEQ ID NO: 229 - RNA, 19 nt, Artificial Sequence
  Description of Artificial Sequence: Synthetic oligonucleotide
gaaucaaaugaugaauugu

SEQ ID NO: 230 - RNA, 19 nt, Artificial Sequence
  Description of Artificial Sequence: Synthetic oligonucleotide
uggagaaggucuuugaugc

SEQ ID NO: 231 - RNA, 19 nt, Artificial Sequence
  Description of Artificial Sequence: Synthetic oligonucleotide
gcuuggaagauagagaaau

SEQ ID NO: 232 - RNA, 19 nt, Artificial Sequence
  Description of Artificial Sequence: Synthetic oligonucleotide
uuggcuuggaagauagaga

SEQ ID NO: 233 - RNA, 19 nt, Artificial Sequence
  Description of Artificial Sequence: Synthetic oligonucleotide
cuuggcuuggaagauagag

SEQ ID NO: 234 - RNA, 19 nt, Artificial Sequence
  Description of Artificial Sequence: Synthetic oligonucleotide
ucuuggcuuggaagauaga

SEQ ID NO: 235 - RNA, 19 nt, Artificial Sequence
  Description of Artificial Sequence: Synthetic oligonucleotide
cucuuggcuuggaagauag

SEQ ID NO: 236 - RNA, 19 nt, Artificial Sequence
  Description of Artificial Sequence: Synthetic oligonucleotide
agaaagggaguaguucuug

SEQ ID NO: 237 - RNA, 19 nt, Artificial Sequence
  Description of Artificial Sequence: Synthetic oligonucleotide
gaagaaagggaguaguucu

SEQ ID NO: 238 - RNA, 19 nt, Artificial Sequence
  Description of Artificial Sequence: Synthetic oligonucleotide
ugaagaaagggaguaguuc

SEQ ID NO: 239 - RNA, 19 nt, Artificial Sequence
  Description of Artificial Sequence: Synthetic oligonucleotide
cugaagaaagggaguaguu

SEQ ID NO: 240 - RNA, 19 nt, Artificial Sequence
  Description of Artificial Sequence: Synthetic oligonucleotide
gccaucauguuuuacauuu

SEQ ID NO: 241 - RNA, 19 nt, Artificial Sequence
  Description of Artificial Sequence: Synthetic oligonucleotide
ugccaucauguuuuacauu

SEQ ID NO: 242 - RNA, 19 nt, Artificial Sequence
  Description of Artificial Sequence: Synthetic oligonucleotide
ggaaugccaucauguuuua

SEQ ID NO: 243 - RNA, 19 nt, Artificial Sequence
  Description of Artificial Sequence: Synthetic oligonucleotide
aucacaguagacaugaaaa

SEQ ID NO: 244 - RNA, 19 nt, Artificial Sequence
  Description of Artificial Sequence: Synthetic oligonucleotide
caucacaguagacaugaaa

SEQ ID NO: 245 - RNA, 19 nt, Artificial Sequence
  Description of Artificial Sequence: Synthetic oligonucleotide
aacaucacaguagacauga

SEQ ID NO: 246 - RNA, 19 nt, Artificial Sequence
  Description of Artificial Sequence: Synthetic oligonucleotide
ccaacucaauucguaaaac

SEQ ID NO: 247 - RNA, 19 nt, Artificial Sequence
  Description of Artificial Sequence: Synthetic oligonucleotide
uccaacucaauucguaaaa

SEQ ID NO: 248 - RNA, 19 nt, Artificial Sequence
  Description of Artificial Sequence: Synthetic oligonucleotide
uagcguauaguugguuucg

SEQ ID NO: 249 - RNA, 19 nt, Artificial Sequence
  Description of Artificial Sequence: Synthetic oligonucleotide
guagcguauaguugguuuc

SEQ ID NO: 250 - RNA, 19 nt, Artificial Sequence
  Description of Artificial Sequence: Synthetic oligonucleotide
uguagcguauaguugguuu

SEQ ID NO: 251 - RNA, 19 nt, Artificial Sequence
  Description of Artificial Sequence: Synthetic oligonucleotide
auguagcguauaguugguu

SEQ ID NO: 252 - RNA, 19 nt, Artificial Sequence
  Description of Artificial Sequence: Synthetic oligonucleotide
guguccuuuugcuuuguga

SEQ ID NO: 253 - RNA, 19 nt, Artificial Sequence
  Description of Artificial Sequence: Synthetic oligonucleotide
caccagccuccugaauaac

SEQ ID NO: 254 - RNA, 19 nt, Artificial Sequence
  Description of Artificial Sequence: Synthetic oligonucleotide
ccaccagccuccugaauaa

SEQ ID NO: 255 - RNA, 19 nt, Artificial Sequence
  Description of Artificial Sequence: Synthetic oligonucleotide
accaccagccuccugaaua

SEQ ID NO: 256 - RNA, 19 nt, Artificial Sequence
  Description of Artificial Sequence: Synthetic oligonucleotide
cacauuaacuuggaaugag

SEQ ID NO: 257 - RNA, 19 nt, Artificial Sequence
  Description of Artificial Sequence: Synthetic oligonucleotide
ccacauuaacuuggaauga

SEQ ID NO: 258 - RNA, 19 nt, Artificial Sequence
  Description of Artificial Sequence: Synthetic oligonucleotide
accacauuaacuuggaaug

SEQ ID NO: 259 - RNA, 19 nt, Artificial Sequence
  Description of Artificial Sequence: Synthetic oligonucleotide
auuuaauaccagauuauua

SEQ ID NO: 260 - RNA, 19 nt, Artificial Sequence
  Description of Artificial Sequence: Synthetic oligonucleotide
gauuuaauaccagauuauu

SEQ ID NO: 261 - RNA, 19 nt, Artificial Sequence
  Description of Artificial Sequence: Synthetic oligonucleotide
aggauuuaauaccagauua

SEQ ID NO: 262 - RNA, 19 nt, Artificial Sequence
  Description of Artificial Sequence: Synthetic oligonucleotide
uaaggauuuaauaccagau

SEQ ID NO: 263 - RNA, 19 nt, Artificial Sequence
  Description of Artificial Sequence: Synthetic oligonucleotide
cuuaaggauuuaauaccag

SEQ ID NO: 264 - RNA, 19 nt, Artificial Sequence
  Description of Artificial Sequence: Synthetic oligonucleotide
ucuuaaggauuuaauacca

SEQ ID NO: 265 - RNA, 19 nt, Artificial Sequence
  Description of Artificial Sequence: Synthetic oligonucleotide
ucucuuaaggauuuaauac

SEQ ID NO: 266 - RNA, 19 nt, Artificial Sequence
  Description of Artificial Sequence: Synthetic oligonucleotide
uguauguuuaaucuuaaau

SEQ ID NO: 267 - RNA, 19 nt, Artificial Sequence
  Description of Artificial Sequence: Synthetic oligonucleotide
ugauuguauguuuaaucuu

SEQ ID NO: 268 - RNA, 19 nt, Artificial Sequence
  Description of Artificial Sequence: Synthetic oligonucleotide
gugauuguauguuuaaucu

SEQ ID NO: 269 - RNA, 19 nt, Artificial Sequence
  Description of Artificial Sequence: Synthetic oligonucleotide
ugugauuguauguuuaauc

SEQ ID NO: 270 - RNA, 19 nt, Artificial Sequence
  Description of Artificial Sequence: Synthetic oligonucleotide
guuaugugauuguauguuu

SEQ ID NO: 271 - RNA, 19 nt, Artificial Sequence
  Description of Artificial Sequence: Synthetic oligonucleotide
gguuaugugauuguauguu

SEQ ID NO: 272 - RNA, 19 nt, Artificial Sequence
  Description of Artificial Sequence: Synthetic oligonucleotide
agguuaugugauuguaugu

SEQ ID NO: 273 - RNA, 19 nt, Artificial Sequence
  Description of Artificial Sequence: Synthetic oligonucleotide
uaagguuaugugauuguau

SEQ ID NO: 274 - RNA, 19 nt, Artificial Sequence
  Description of Artificial Sequence: Synthetic oligonucleotide
uuuaagguuaugugauugu

SEQ ID NO: 275 - RNA, 19 nt, Artificial Sequence
  Description of Artificial Sequence: Synthetic oligonucleotide
cuuuaagguuaugugauug

SEQ ID NO: 276 - RNA, 19 nt, Artificial Sequence
  Description of Artificial Sequence: Synthetic oligonucleotide
ucuuuaagguuaugugauu

SEQ ID NO: 277 - RNA, 19 nt, Artificial Sequence
  Description of Artificial Sequence: Synthetic oligonucleotide
uucuuuaagguuaugugau

SEQ ID NO: 278 - RNA, 19 nt, Artificial Sequence
  Description of Artificial Sequence: Synthetic oligonucleotide
auucuuuaagguuauguga

SEQ ID NO: 279 - RNA, 19 nt, Artificial Sequence
  Description of Artificial Sequence: Synthetic oligonucleotide
uauucuuuaagguuaugug

SEQ ID NO: 280 - RNA, 19 nt, Artificial Sequence
  Description of Artificial Sequence: Synthetic oligonucleotide
guauucuuuaagguuaugu

SEQ ID NO: 281 - RNA, 19 nt, Artificial Sequence
  Description of Artificial Sequence: Synthetic oligonucleotide
gguauucuuuaagguuaug

SEQ ID NO: 282 - RNA, 19 nt, Artificial Sequence
  Description of Artificial Sequence: Synthetic oligonucleotide
gaauuuugauugagaaaug

SEQ ID NO: 283 - RNA, 19 nt, Artificial Sequence
  Description of Artificial Sequence: Synthetic oligonucleotide
uaagaauuuugauugagaa

SEQ ID NO: 284 - RNA, 19 nt, Artificial Sequence
  Description of Artificial Sequence: Synthetic oligonucleotide
gauucccacaucacaaaau

SEQ ID NO: 285 - RNA, 19 nt, Artificial Sequence
  Description of Artificial Sequence: Synthetic oligonucleotide
ugauucccacaucacaaaa

SEQ ID NO: 286 - RNA, 19 nt, Artificial Sequence
  Description of Artificial Sequence: Synthetic oligonucleotide
uugauucccacaucacaaa

SEQ ID NO: 287 - RNA, 19 nt, Artificial Sequence
  Description of Artificial Sequence: Synthetic oligonucleotide
auugauucccacaucacaa

SEQ ID NO: 288 - RNA, 19 nt, Artificial Sequence
  Description of Artificial Sequence: Synthetic oligonucleotide
aauugauucccacaucaca

SEQ ID NO: 289 - RNA, 19 nt, Artificial Sequence
  Description of Artificial Sequence: Synthetic oligonucleotide
aaauugauucccacaucac

SEQ ID NO: 290 - RNA, 19 nt, Artificial Sequence
  Description of Artificial Sequence: Synthetic oligonucleotide
aaaauugauucccacauca

SEQ ID NO: 291 - RNA, 19 nt, Artificial Sequence
  Description of Artificial Sequence: Synthetic oligonucleotide
uaaaauugauucccacauc

SEQ ID NO: 292 - RNA, 19 nt, Artificial Sequence
  Description of Artificial Sequence: Synthetic oligonucleotide
cuaaaauugauucccacau

SEQ ID NO: 293 - RNA, 19 nt, Artificial Sequence
  Description of Artificial Sequence: Synthetic oligonucleotide
ucuaaaauugauucccaca

SEQ ID NO: 294 - RNA, 19 nt, Artificial Sequence
  Description of Artificial Sequence: Synthetic oligonucleotide
aucuaaaauugauucccac

SEQ ID NO: 295 - RNA, 19 nt, Artificial Sequence
  Description of Artificial Sequence: Synthetic oligonucleotide
caucuaaaauugauuccca

SEQ ID NO: 296 - RNA, 19 nt, Artificial Sequence
  Description of Artificial Sequence: Synthetic oligonucleotide
ccaucuaaaauugauuccc

SEQ ID NO: 297 - RNA, 19 nt, Artificial Sequence
  Description of Artificial Sequence: Synthetic oligonucleotide
accaucuaaaauugauucc

SEQ ID NO: 298 - RNA, 19 nt, Artificial Sequence
  Description of Artificial Sequence: Synthetic oligonucleotide
gaccaucuaaaauugauuc

SEQ ID NO: 299 - RNA, 19 nt, Artificial Sequence
  Description of Artificial Sequence: Synthetic oligonucleotide
gauauuagcucauaugaug

SEQ ID NO: 300 - RNA, 19 nt, Artificial Sequence
  Description of Artificial Sequence: Synthetic oligonucleotide
ugauauuagcucauaugau

SEQ ID NO: 301 - RNA, 19 nt, Artificial Sequence
  Description of Artificial Sequence: Synthetic oligonucleotide
gugauauuagcucauauga

SEQ ID NO: 302 - RNA, 19 nt, Artificial Sequence
  Description of Artificial Sequence: Synthetic oligonucleotide
ugugauauuagcucauaug

SEQ ID NO: 303 - RNA, 19 nt, Artificial Sequence
  Description of Artificial Sequence: Synthetic oligonucleotide
uugugauauuagcucauau

SEQ ID NO: 304 - RNA, 19 nt, Artificial Sequence
  Description of Artificial Sequence: Synthetic oligonucleotide
acuaguuuuuuaaacuggg

SEQ ID NO: 305 - RNA, 19 nt, Artificial Sequence
  Description of Artificial Sequence: Synthetic oligonucleotide
agucaaguuuagaguuuua

SEQ ID NO: 306 - RNA, 19 nt, Artificial Sequence
  Description of Artificial Sequence: Synthetic oligonucleotide
uagucaaguuuagaguuuu

SEQ ID NO: 307 - RNA, 19 nt, Artificial Sequence
  Description of Artificial Sequence: Synthetic oligonucleotide
uuagucaaguuuagaguuu

SEQ ID NO: 308 - RNA, 19 nt, Artificial Sequence
  Description of Artificial Sequence: Synthetic oligonucleotide
auuuagucaaguuuagagu

SEQ ID NO: 309 - RNA, 19 nt, Artificial Sequence
  Description of Artificial Sequence: Synthetic oligonucleotide
uauuuagucaaguuuagag

SEQ ID NO: 310 - RNA, 19 nt, Artificial Sequence
  Description of Artificial Sequence: Synthetic oligonucleotide
acacauacucugugcugac

SEQ ID NO: 311 - RNA, 19 nt, Artificial Sequence
  Description of Artificial Sequence: Synthetic oligonucleotide
uagguuucauaaauaaauc

SEQ ID NO: 312 - RNA, 19 nt, Artificial Sequence
  Description of Artificial Sequence: Synthetic oligonucleotide
uucauuagguuucauaaau

SEQ ID NO: 313 - RNA, 19 nt, Artificial Sequence
  Description of Artificial Sequence: Synthetic oligonucleotide
cuucauuagguuucauaaa

SEQ ID NO: 314 - RNA, 19 nt, Artificial Sequence
  Description of Artificial Sequence: Synthetic oligonucleotide
ugcuucauuagguuucaua

SEQ ID NO: 315 - RNA, 19 nt, Artificial Sequence
  Description of Artificial Sequence: Synthetic oligonucleotide
cugcuucauuagguuucau

SEQ ID NO: 316 - RNA, 19 nt, Artificial Sequence
  Description of Artificial Sequence: Synthetic oligonucleotide
aagucaaugugacuuagua

SEQ ID NO: 317 - RNA, 19 nt, Artificial Sequence
  Description of Artificial Sequence: Synthetic oligonucleotide
aaagucaaugugacuuagu

SEQ ID NO: 318 - RNA, 19 nt, Artificial Sequence
  Description of Artificial Sequence: Synthetic oligonucleotide
uaaagucaaugugacuuag

SEQ ID NO: 319 - RNA, 19 nt, Artificial Sequence
  Description of Artificial Sequence: Synthetic oligonucleotide
uuaaagucaaugugacuua

SEQ ID NO: 320 - RNA, 19 nt, Artificial Sequence
  Description of Artificial Sequence: Synthetic oligonucleotide
uaagguauagugauaccuc

SEQ ID NO: 321 - RNA, 19 nt, Artificial Sequence
  Description of Artificial Sequence: Synthetic oligonucleotide
uuguuuucauaguauuaag

SEQ ID NO: 322 - RNA, 19 nt, Artificial Sequence
  Description of Artificial Sequence: Synthetic oligonucleotide
uauaaacuuuaacucgaug

SEQ ID NO: 323 - RNA, 19 nt, Artificial Sequence
  Description of Artificial Sequence: Synthetic oligonucleotide
auauaaacuuuaacucgau

SEQ ID NO: 324 - RNA, 19 nt, Artificial Sequence
  Description of Artificial Sequence: Synthetic oligonucleotide
aauauaaacuuuaacucga

SEQ ID NO: 325 - RNA, 19 nt, Artificial Sequence
  Description of Artificial Sequence: Synthetic oligonucleotide
aaauauaaacuuuaacucg

SEQ ID NO: 326 - RNA, 19 nt, Artificial Sequence
  Description of Artificial Sequence: Synthetic oligonucleotide
uuaggggaaauauaaacuu

SEQ ID NO: 327 - RNA, 19 nt, Artificial Sequence
  Description of Artificial Sequence: Synthetic oligonucleotide
uuuaggggaaauauaaacu

SEQ ID NO: 328 - RNA, 19 nt, Artificial Sequence
  Description of Artificial Sequence: Synthetic oligonucleotide
cagcauauuuaggggaaau

SEQ ID NO: 329 - RNA, 19 nt, Artificial Sequence
  Description of Artificial Sequence: Synthetic oligonucleotide
aaucuuuagggauuuaggg

SEQ ID NO: 330 - RNA, 19 nt, Artificial Sequence
  Description of Artificial Sequence: Synthetic oligonucleotide
uaaucuuuagggauuuagg

SEQ ID NO: 331 - RNA, 19 nt, Artificial Sequence
  Description of Artificial Sequence: Synthetic oligonucleotide
cuaaucuuuagggauuuag

SEQ ID NO: 332 - RNA, 19 nt, Artificial Sequence
  Description of Artificial Sequence: Synthetic oligonucleotide
ucuaaucuuuagggauuua

SEQ ID NO: 333 - RNA, 19 nt, Artificial Sequence
  Description of Artificial Sequence: Synthetic oligonucleotide
aucuaaucuuuagggauuu

SEQ ID NO: 334 - RNA, 19 nt, Artificial Sequence
  Description of Artificial Sequence: Synthetic oligonucleotide
cuuuaacaaauggguuuaa

SEQ ID NO: 335 - RNA, 19 nt, Artificial Sequence
  Description of Artificial Sequence: Synthetic oligonucleotide
cacuauauccuuuaacaaa

SEQ ID NO: 336 - RNA, 19 nt, Artificial Sequence
  Description of Artificial Sequence: Synthetic oligonucleotide
gcacuauauccuuuaacaa

SEQ ID NO: 337 - RNA, 19 nt, Artificial Sequence
  Description of Artificial Sequence: Synthetic oligonucleotide
ggcacuauauccuuuaaca

SEQ ID NO: 338 - RNA, 19 nt, Artificial Sequence
  Description of Artificial Sequence: Synthetic oligonucleotide
gggcacuauauccuuuaac

SEQ ID NO: 339 - RNA, 19 nt, Artificial Sequence
  Description of Artificial Sequence: Synthetic oligonucleotide
ugggcacuauauccuuuaa

SEQ ID NO: 340 - RNA, 19 nt, Artificial Sequence
  Description of Artificial Sequence: Synthetic oligonucleotide
uugggcacuauauccuuua

SEQ ID NO: 341 - RNA, 19 nt, Artificial Sequence
  Description of Artificial Sequence: Synthetic oligonucleotide
aacuugggcacuauauccu

SEQ ID NO: 342 - RNA, 19 nt, Artificial Sequence
  Description of Artificial Sequence: Synthetic oligonucleotide
uaacuugggcacuauaucc

SEQ ID NO: 343 - RNA, 19 nt, Artificial Sequence
  Description of Artificial Sequence: Synthetic oligonucleotide
auaacuugggcacuauauc

SEQ ID NO: 344 - RNA, 19 nt, Artificial Sequence
  Description of Artificial Sequence: Synthetic oligonucleotide
uauaacuugggcacuauau

SEQ ID NO: 345 - RNA, 19 nt, Artificial Sequence
  Description of Artificial Sequence: Synthetic oligonucleotide
uugacaaagguaggucacc

SEQ ID NO: 346 - RNA, 19 nt, Artificial Sequence
  Description of Artificial Sequence: Synthetic oligonucleotide
auugacaaagguaggucac

SEQ ID NO: 347 - RNA, 19 nt, Artificial Sequence
  Description of Artificial Sequence: Synthetic oligonucleotide
uauugacaaagguagguca

SEQ ID NO: 348 - RNA, 19 nt, Artificial Sequence
  Description of Artificial Sequence: Synthetic oligonucleotide
uggauaauuugaaauacau

SEQ ID NO: 349 - RNA, 19 nt, Artificial Sequence
  Description of Artificial Sequence: Synthetic oligonucleotide
guauauuggauaauuugaa

SEQ ID NO: 350 - RNA, 19 nt, Artificial Sequence
  Description of Artificial Sequence: Synthetic oligonucleotide
uguauauuggauaauuuga

SEQ ID NO: 351 - RNA, 19 nt, Artificial Sequence
  Description of Artificial Sequence: Synthetic oligonucleotide
gacauguauauuggauaau

SEQ ID NO: 352 - RNA, 19 nt, Artificial Sequence
  Description of Artificial Sequence: Synthetic oligonucleotide
ugacauguauauuggauaa

SEQ ID NO: 353 - RNA, 19 nt, Artificial Sequence
  Description of Artificial Sequence: Synthetic oligonucleotide
augacauguauauuggaua

SEQ ID NO: 354 - RNA, 19 nt, Artificial Sequence
  Description of Artificial Sequence: Synthetic oligonucleotide
uaaaaauauauaugacaug

SEQ ID NO: 355 - RNA, 19 nt, Artificial Sequence
  Description of Artificial Sequence: Synthetic oligonucleotide
accuuuauuauuuuguacu

SEQ ID NO: 356 - RNA, 19 nt, Artificial Sequence
  Description of Artificial Sequence: Synthetic oligonucleotide
uaccuuuauuauuuuguac

SEQ ID NO: 357 - RNA, 19 nt, Artificial Sequence
  Description of Artificial Sequence: Synthetic oligonucleotide
cugugguccugaaaauuau

SEQ ID NO: 358 - RNA, 19 nt, Artificial Sequence
  Description of Artificial Sequence: Synthetic oligonucleotide
gucugugguccugaaaauu

SEQ ID NO: 359 - RNA, 19 nt, Artificial Sequence
  Description of Artificial Sequence: Synthetic oligonucleotide
uagucugugguccugaaaa

SEQ ID NO: 360 - RNA, 19 nt, Artificial Sequence
  Description of Artificial Sequence: Synthetic oligonucleotide
uuagucugugguccugaaa

SEQ ID NO: 361 - RNA, 19 nt, Artificial Sequence
  Description of Artificial Sequence: Synthetic oligonucleotide
cuuagucugugguccugaa

SEQ ID NO: 362 - RNA, 19 nt, Artificial Sequence
  Description of Artificial Sequence: Synthetic oligonucleotide
gcuuagucugugguccuga

SEQ ID NO: 363 - RNA, 19 nt, Artificial Sequence
  Description of Artificial Sequence: Synthetic oligonucleotide
cagcuuagucugugguccu

SEQ ID NO: 364 - RNA, 19 nt, Artificial Sequence
  Description of Artificial Sequence: Synthetic oligonucleotide
acagcuuagucuguggucc

SEQ ID NO: 365 - RNA, 19 nt, Artificial Sequence
  Description of Artificial Sequence: Synthetic oligonucleotide
gacagcuuagucugugguc

SEQ ID NO: 366 - RNA, 19 nt, Artificial Sequence
  Description of Artificial Sequence: Synthetic oligonucleotide
guauucuggcccuaaaaaa

SEQ ID NO: 367 - RNA, 19 nt, Artificial Sequence
  Description of Artificial Sequence: Synthetic oligonucleotide
gguauucuggcccuaaaaa

SEQ ID NO: 368 - RNA, 19 nt, Artificial Sequence
  Description of Artificial Sequence: Synthetic oligonucleotide
ugguauucuggcccuaaaa

SEQ ID NO: 369 - RNA, 19 nt, Artificial Sequence
  Description of Artificial Sequence: Synthetic oligonucleotide
uugguauucuggcccuaaa

SEQ ID NO: 370 - RNA, 19 nt, Artificial Sequence
  Description of Artificial Sequence: Synthetic oligonucleotide
uuugguauucuggcccuaa

SEQ ID NO: 371 - RNA, 19 nt, Artificial Sequence
  Description of Artificial Sequence: Synthetic oligonucleotide
uuuugguauucuggcccua

SEQ ID NO: 372 - RNA, 19 nt, Artificial Sequence
  Description of Artificial Sequence: Synthetic oligonucleotide
auuuugguauucuggcccu

SEQ ID NO: 373 - RNA, 19 nt, Artificial Sequence
  Description of Artificial Sequence: Synthetic oligonucleotide
auuugaaauuguccaauuu

SEQ ID NO: 374 - RNA, 19 nt, Artificial Sequence
  Description of Artificial Sequence: Synthetic oligonucleotide
gcauuugaaauuguccaau

SEQ ID NO: 375 - RNA, 19 nt, Artificial Sequence
  Description of Artificial Sequence: Synthetic oligonucleotide
ugcauuugaaauuguccaa

SEQ ID NO: 376 - RNA, 19 nt, Artificial Sequence
  Description of Artificial Sequence: Synthetic oligonucleotide
gaagcaacucauauauuaa

SEQ ID NO: 377 - RNA, 19 nt, Artificial Sequence
  Description of Artificial Sequence: Synthetic oligonucleotide
gaauugucuugaucaauuc

SEQ ID NO: 378 - RNA, 19 nt, Artificial Sequence
  Description of Artificial Sequence: Synthetic oligonucleotide
ugaauugucuugaucaauu

SEQ ID NO: 379 - RNA, 19 nt, Artificial Sequence
  Description of Artificial Sequence: Synthetic oligonucleotide
augaauugucuugaucaau

SEQ ID NO: 380 - RNA, 19 nt, Artificial Sequence
  Description of Artificial Sequence: Synthetic oligonucleotide
gaugaauugucuugaucaa

SEQ ID NO: 381 - RNA, 19 nt, Artificial Sequence
  Description of Artificial Sequence: Synthetic oligonucleotide
ugaugaauugucuugauca

SEQ ID NO: 382 - RNA, 19 nt, Artificial Sequence
  Description of Artificial Sequence: Synthetic oligonucleotide
augaugaauugucuugauc

SEQ ID NO: 383 - RNA, 19 nt, Artificial Sequence
  Description of Artificial Sequence: Synthetic oligonucleotide
aaugaugaauugucuugau

SEQ ID NO: 384 - RNA, 19 nt, Artificial Sequence
  Description of Artificial Sequence: Synthetic oligonucleotide
aaaugaugaauugucuuga

SEQ ID NO: 385 - RNA, 19 nt, Artificial Sequence
  Description of Artificial Sequence: Synthetic oligonucleotide
auagagaaucaaaugauga

SEQ ID NO: 386 - RNA, 19 nt, Artificial Sequence
  Description of Artificial Sequence: Synthetic oligonucleotide
gauagagaaucaaaugaug

SEQ ID NO: 387 - RNA, 19 nt, Artificial Sequence
  Description of Artificial Sequence: Synthetic oligonucleotide
agauagagaaucaaaugau

SEQ ID NO: 388 - RNA, 19 nt, Artificial Sequence
  Description of Artificial Sequence: Synthetic oligonucleotide
cuucugagcugauuuucua

SEQ ID NO: 389 - RNA, 19 nt, Artificial Sequence
  Description of Artificial Sequence: Synthetic oligonucleotide
uccuucugagcugauuuuc

SEQ ID NO: 390 - RNA, 19 nt, Artificial Sequence
  Description of Artificial Sequence: Synthetic oligonucleotide
guccuucugagcugauuuu

SEQ ID NO: 391 - RNA, 19 nt, Artificial Sequence
  Description of Artificial Sequence: Synthetic oligonucleotide
aguccuucugagcugauuu

SEQ ID NO: 392 - RNA, 19 nt, Artificial Sequence
  Description of Artificial Sequence: Synthetic oligonucleotide
uaguccuucugagcugauu

SEQ ID NO: 393 - RNA, 19 nt, Artificial Sequence
  Description of Artificial Sequence: Synthetic oligonucleotide
auucagcaggaaugccauc

SEQ ID NO: 394 - RNA, 19 nt, Artificial Sequence
  Description of Artificial Sequence: Synthetic oligonucleotide
gguacauucagcaggaaug

SEQ ID NO: 395 - RNA, 19 nt, Artificial Sequence
  Description of Artificial Sequence: Synthetic oligonucleotide
ggugguacauucagcagga

SEQ ID NO: 396 - RNA, 19 nt, Artificial Sequence
  Description of Artificial Sequence: Synthetic oligonucleotide
auggugguacauucagcag

SEQ ID NO: 397 - RNA, 19 nt, Artificial Sequence
  Description of Artificial Sequence: Synthetic oligonucleotide
aauggugguacauucagca

SEQ ID NO: 398 - RNA, 19 nt, Artificial Sequence
  Description of Artificial Sequence: Synthetic oligonucleotide
aaauggugguacauucagc

SEQ ID NO: 399 - RNA, 19 nt, Artificial Sequence
  Description of Artificial Sequence: Synthetic oligonucleotide
uaaauggugguacauucag

SEQ ID NO: 400 - RNA, 19 nt, Artificial Sequence
  Description of Artificial Sequence: Synthetic oligonucleotide
cacuuguauguucaccucu

SEQ ID NO: 401 - RNA, 19 nt, Artificial Sequence
  Description of Artificial Sequence: Synthetic oligonucleotide
ccacuuguauguucaccuc

SEQ ID NO: 402 - RNA, 19 nt, Artificial Sequence
  Description of Artificial Sequence: Synthetic oligonucleotide
gccacuuguauguucaccu

SEQ ID NO: 403 - RNA, 19 nt, Artificial Sequence
  Description of Artificial Sequence: Synthetic oligonucleotide
ugccacuuguauguucacc

SEQ ID NO: 404 - RNA, 19 nt, Artificial Sequence
  Description of Artificial Sequence: Synthetic oligonucleotide
gauggcauacaugccacuu

SEQ ID NO: 405 - RNA, 19 nt, Artificial Sequence
  Description of Artificial Sequence: Synthetic oligonucleotide
ugauggcauacaugccacu

SEQ ID NO: 406 - RNA, 19 nt, Artificial Sequence
  Description of Artificial Sequence: Synthetic oligonucleotide
cugauggcauacaugccac

SEQ ID NO: 407 - RNA, 19 nt, Artificial Sequence
  Description of Artificial Sequence: Synthetic oligonucleotide
ucugauggcauacaugcca

SEQ ID NO: 408 - RNA, 19 nt, Artificial Sequence
  Description of Artificial Sequence: Synthetic oligonucleotide
aacuagauguagcguauag

SEQ ID NO: 409 - RNA, 19 nt, Artificial Sequence
  Description of Artificial Sequence: Synthetic oligonucleotide
caguugaaguguccuuuug

SEQ ID NO: 410 - RNA, 19 nt, Artificial Sequence
  Description of Artificial Sequence: Synthetic oligonucleotide
acaguugaaguguccuuuu

SEQ ID NO: 411 - RNA, 19 nt, Artificial Sequence
  Description of Artificial Sequence: Synthetic oligonucleotide
gacaguugaaguguccuuu

SEQ ID NO: 412 - RNA, 19 nt, Artificial Sequence
  Description of Artificial Sequence: Synthetic oligonucleotide
ggacaguugaaguguccuu

SEQ ID NO: 413 - RNA, 19 nt, Artificial Sequence
  Description of Artificial Sequence: Synthetic oligonucleotide
uggacaguugaaguguccu

SEQ ID NO: 414 - RNA, 19 nt, Artificial Sequence
  Description of Artificial Sequence: Synthetic oligonucleotide
cuggacaguugaagugucc

SEQ ID NO: 415 - RNA, 19 nt, Artificial Sequence
  Description of Artificial Sequence: Synthetic oligonucleotide
ccugaauaacccucuggac

SEQ ID NO: 416 - RNA, 19 nt, Artificial Sequence
  Description of Artificial Sequence: Synthetic oligonucleotide
uccugaauaacccucugga

SEQ ID NO: 417 - RNA, 19 nt, Artificial Sequence
  Description of Artificial Sequence: Synthetic oligonucleotide
cuccugaauaacccucugg

SEQ ID NO: 418 - RNA, 19 nt, Artificial Sequence
  Description of Artificial Sequence: Synthetic oligonucleotide
ccuccugaauaacccucug

SEQ ID NO: 419 - RNA, 19 nt, Artificial Sequence
  Description of Artificial Sequence: Synthetic oligonucleotide
gccuccugaauaacccucu

SEQ ID NO: 420 - RNA, 19 nt, Artificial Sequence
  Description of Artificial Sequence: Synthetic oligonucleotide
agccuccugaauaacccuc

SEQ ID NO: 421 - RNA, 19 nt, Artificial Sequence
  Description of Artificial Sequence: Synthetic oligonucleotide
cagccuccugaauaacccu

SEQ ID NO: 422 - RNA, 19 nt, Artificial Sequence
  Description of Artificial Sequence: Synthetic oligonucleotide
accagccuccugaauaacc

SEQ ID NO: 423 - RNA, 19 nt, Artificial Sequence
  Description of Artificial Sequence: Synthetic oligonucleotide
cuuccaagauaauccucuu

SEQ ID NO: 424 - RNA, 19 nt, Artificial Sequence
  Description of Artificial Sequence: Synthetic oligonucleotide
acuuccaagauaauccucu

SEQ ID NO: 425 - RNA, 19 nt, Artificial Sequence
  Description of Artificial Sequence: Synthetic oligonucleotide
gacuuccaagauaauccuc

SEQ ID NO: 426 - RNA, 21 nt, Artificial Sequence
  Description of Artificial Sequence: Synthetic oligonucleotide
gaaucaaaugaugaauugucu

SEQ ID NO: 427 - RNA, 20 nt, Artificial Sequence
  Description of Artificial Sequence: Synthetic oligonucleotide
gacaauucaucauuugauuc

SEQ ID NO: 428 - RNA, 20 nt, Artificial Sequence
  Description of Artificial Sequence: Synthetic oligonucleotide
gaaucaaaugaugaauuguc

SEQ ID NO: 429 - DNA, 23 bp, Artificial Sequence
  Description of Artificial Sequence: Synthetic oligonucleotide
  Description of Combined DNA/RNA Molecule: Synthetic oligonucleotide
  N-term hydroxyl group
  C-term hydroxyl group
  modified_base 1..1: /mod_base="OTHER" /note="2'-OMe-nucleotide"
  modified_base 2..2: /mod_base="OTHER" /note="2'-OMe-nucleotide"
  modified_base 3..3: /mod_base="OTHER" /note="2'-OMe-nucleotide"
  modified_base 4..4: /mod_base="OTHER" /note="2'-fluoro-nucleotide"
  modified_base 5..5: /mod_base="OTHER" /note="2'-OMe-nucleotide"
  modified_base 6..6: /mod_base="OTHER" /note="2'-fluoro-nucleotide"
  modified_base 7..7: /mod_base="OTHER" /note="2'-OMe-nucleotide"
  modified_base 8..8: /mod_base="OTHER" /note="2'-fluoro-nucleotide"
  modified_base 9..9: /mod_base="OTHER" /note="2'-OMe-nucleotide"
  modified_base 10..10: /mod_base="OTHER" /note="2'-fluoro-nucleotide"
  modified_base 11..11: /mod_base="OTHER" /note="2'-OMe-nucleotide"
  modified_base 12..12: /mod_base="OTHER" /note="2'-fluoro-nucleotide"
  modified_base 13..13: /mod_base="OTHER" /note="2'-OMe-nucleotide"
  modified_base 14..14: /mod_base="OTHER" /note="2'-fluoro-nucleotide"
  modified_base 15..15: /mod_base="OTHER" /note="2'-OMe-nucleotide"
  modified_base 16..16: /mod_base="OTHER" /note="2'-fluoro-nucleotide"
  modified_base 17..17: /mod_base="OTHER" /note="2'-OMe-nucleotide"
  modified_base 18..18: /mod_base="OTHER" /note="2'-fluoro-nucleotide"
  modified_base 19..19: /mod_base="OTHER" /note="2'-OMe-nucleotide"
  modified_base 20..20: /mod_base="OTHER" /note="2'-fluoro-nucleotide"
  modified_base 21..21: /mod_base="OTHER" /note="2'-OMe-nucleotide"
  modified_base 22..22: /mod_base="OTHER" /note="2'-fluoro-nucleotide"
  modified_base 23..23: /mod_base="OTHER" /note="Inverted nucleotide"
ccauauauagaguuaagaaguct

SEQ ID NO: 430 - DNA, 23 bp, Artificial Sequence
  Description of Artificial Sequence: Synthetic oligonucleotide
  Description of Combined DNA/RNA Molecule: Synthetic oligonucleotide
  N-term hydroxyl group
  C-term hydroxyl group
  modified_base 1..1: /mod_base="OTHER" /note="2'-OMe-nucleotide"
  modified_base 2..2: /mod_base="OTHER" /note="2'-OMe-nucleotide"
  modified_base 3..3: /mod_base="OTHER" /note="2'-OMe-nucleotide"
  modified_base 4..4: /mod_base="OTHER" /note="2'-fluoro-nucleotide"
  modified_base 5..5: /mod_base="OTHER" /note="2'-OMe-nucleotide"
  modified_base 6..6: /mod_base="OTHER" /note="2'-fluoro-nucleotide"
  modified_base 7..7: /mod_base="OTHER" /note="2'-OMe-nucleotide"
  modified_base 8..8: /mod_base="OTHER" /note="2'-fluoro-nucleotide"
  modified_base 9..9: /mod_base="OTHER" /note="2'-OMe-nucleotide"
  modified_base 10..10: /mod_base="OTHER" /note="2'-fluoro-nucleotide"
  modified_base 11..11: /mod_base="OTHER" /note="2'-OMe-nucleotide"
  modified_base 12..12: /mod_base="OTHER" /note="2'-fluoro-nucleotide"
  modified_base 13..13: /mod_base="OTHER" /note="2'-OMe-nucleotide"
  modified_base 14..14: /mod_base="OTHER" /note="2'-fluoro-nucleotide"
  modified_base 15..15: /mod_base="OTHER" /note="2'-OMe-nucleotide"
  modified_base 16..16: /mod_base="OTHER" /note="2'-fluoro-nucleotide"
  modified_base 17..17: /mod_base="OTHER" /note="2'-OMe-nucleotide"
  modified_base 18..18: /mod_base="OTHER" /note="2'-fluoro-nucleotide"
  modified_base 19..19: /mod_base="OTHER" /note="2'-OMe-nucleotide"
  modified_base 20..20: /mod_base="OTHER" /note="2'-fluoro-nucleotide"
  modified_base 21..21: /mod_base="OTHER" /note="2'-OMe-nucleotide"
  modified_base 22..22: /mod_base="OTHER" /note="2'-fluoro-nucleotide"
  modified_base 23..23: /mod_base="OTHER" /note="Inverted nucleotide"
ccaauauagaguuaagaagucut

SEQ ID NO: 431 - DNA, 23 bp, Artificial Sequence
  Description of Artificial Sequence: Synthetic oligonucleotide
  Description of Combined DNA/RNA Molecule: Synthetic oligonucleotide
  N-term hydroxyl group
  C-term hydroxyl group
  modified_base 1..1: /mod_base="OTHER" /note="2'-OMe-nucleotide"
  modified_base 2..2: /mod_base="OTHER" /note="2'-OMe-nucleotide"
  modified_base 3..3: /mod_base="OTHER" /note="2'-OMe-nucleotide"
  modified_base 4..4: /mod_base="OTHER" /note="2'-fluoro-nucleotide"
  modified_base 5..5: /mod_base="OTHER" /note="2'-OMe-nucleotide"
  modified_base 6..6: /mod_base="OTHER" /note="2'-fluoro-nucleotide"
  modified_base 7..7: /mod_base="OTHER" /note="2'-OMe-nucleotide"
  modified_base 8..8: /mod_base="OTHER" /note="2'-fluoro-nucleotide"
  modified_base 9..9: /mod_base="OTHER" /note="2'-OMe-nucleotide"
  modified_base 10..10: /mod_base="OTHER" /note="2'-fluoro-nucleotide"
  modified_base 11..11: /mod_base="OTHER" /note="2'-OMe-nucleotide"
  modified_base 12..12: /mod_base="OTHER" /note="2'-fluoro-nucleotide"
  modified_base 13..13: /mod_base="OTHER" /note="2'-OMe-nucleotide"
  modified_base 14..14: /mod_base="OTHER" /note="2'-fluoro-nucleotide"
  modified_base 15..15: /mod_base="OTHER" /note="2'-OMe-nucleotide"
  modified_base 16..16: /mod_base="OTHER" /note="2'-fluoro-nucleotide"
  modified_base 17..17: /mod_base="OTHER" /note="2'-OMe-nucleotide"
  modified_base 18..18: /mod_base="OTHER" /note="2'-fluoro-nucleotide"
  modified_base 19..19: /mod_base="OTHER" /note="2'-OMe-nucleotide"
  modified_base 20..20: /mod_base="OTHER" /note="2'-fluoro-nucleotide"
  modified_base 21..21: /mod_base="OTHER" /note="2'-OMe-nucleotide"
  modified_base 22..22: /mod_base="OTHER" /note="2'-fluoro-nucleotide"
  modified_base 23..23: /mod_base="OTHER" /note="Inverted nucleotide"
ccauauagaguuaagaagucuat

SEQ ID NO: 432 - DNA, 23 bp, Artificial Sequence
  Description of Artificial Sequence: Synthetic oligonucleotide
  Description of Combined DNA/RNA Molecule: Synthetic oligonucleotide
  N-term hydroxyl group
  C-term hydroxyl group
  modified_base 1..1: /mod_base="OTHER" /note="2'-OMe-nucleotide"
  modified_base 2..2: /mod_base="OTHER" /note="2'-OMe-nucleotide"
  modified_base 3..3: /mod_base="OTHER" /note="2'-OMe-nucleotide"
  modified_base 4..4: /mod_base="OTHER" /note="2'-fluoro-nucleotide"
  modified_base 5..5: /mod_base="OTHER" /note="2'-OMe-nucleotide"
  modified_base 6..6: /mod_base="OTHER" /note="2'-fluoro-nucleotide"
  modified_base 7..7: /mod_base="OTHER" /note="2'-OMe-nucleotide"
  modified_base 8..8: /mod_base="OTHER" /note="2'-fluoro-nucleotide"
  modified_base 9..9: /mod_base="OTHER" /note="2'-OMe-nucleotide"
  modified_base 10..10: /mod_base="OTHER" /note="2'-fluoro-nucleotide"
  modified_base 11..11: /mod_base="OTHER" /note="2'-OMe-nucleotide"
  modified_base 12..12: /mod_base="OTHER" /note="2'-fluoro-nucleotide"
  modified_base 13..13: /mod_base="OTHER" /note="2'-OMe-nucleotide"
  modified_base 14..14: /mod_base="OTHER" /note="2'-fluoro-nucleotide"
  modified_base 15..15: /mod_base="OTHER" /note="2'-OMe-nucleotide"
  modified_base 16..16: /mod_base="OTHER" /note="2'-fluoro-nucleotide"
  modified_base 17..17: /mod_base="OTHER" /note="2'-OMe-nucleotide"
  modified_base 18..18: /mod_base="OTHER" /note="2'-fluoro-nucleotide"
  modified_base 19..19: /mod_base="OTHER" /note="2'-OMe-nucleotide"
  modified_base 20..20: /mod_base="OTHER" /note="2'-fluoro-nucleotide"
  modified_base 21..21: /mod_base="OTHER" /note="2'-OMe-nucleotide"
  modified_base 22..22: /mod_base="OTHER" /note="2'-fluoro-nucleotide"
  modified_base 23..23: /mod_base="OTHER" /note="Inverted nucleotide"
ccaaguuaagaagucuaggucut

SEQ ID NO: 433 - DNA, 23 bp, Artificial Sequence
  Description of Artificial Sequence: Synthetic oligonucleotide
  Description of Combined DNA/RNA Molecule: Synthetic oligonucleotide
  N-term hydroxyl group
  C-term hydroxyl group
  modified_base 1..1: /mod_base="OTHER" /note="2'-OMe-nucleotide"
  modified_base 2..2: /mod_base="OTHER" /note="2'-OMe-nucleotide"
  modified_base 3..3: /mod_base="OTHER" /note="2'-OMe-nucleotide"
  modified_base 4..4: /mod_base="OTHER" /note="2'-fluoro-nucleotide"
  modified_base 5..5: /mod_base="OTHER" /note="2'-OMe-nucleotide"
  modified_base 6..6: /mod_base="OTHER" /note="2'-fluoro-nucleotide"
  modified_base 7..7: /mod_base="OTHER" /note="2'-OMe-nucleotide"
  modified_base 8..8: /mod_base="OTHER" /note="2'-fluoro-nucleotide"
  modified_base 9..9: /mod_base="OTHER" /note="2'-OMe-nucleotide"
  modified_base 10..10: /mod_base="OTHER" /note="2'-fluoro-nucleotide"
  modified_base 11..11: /mod_base="OTHER" /note="2'-OMe-nucleotide"
  modified_base 12..12: /mod_base="OTHER" /note="2'-fluoro-nucleotide"
  modified_base 13..13: /mod_base="OTHER" /note="2'-OMe-nucleotide"
  modified_base 14..14: /mod_base="OTHER" /note="2'-fluoro-nucleotide"
  modified_base 15..15: /mod_base="OTHER" /note="2'-OMe-nucleotide"
  modified_base 16..16: /mod_base="OTHER" /note="2'-fluoro-nucleotide"
  modified_base 17..17: /mod_base="OTHER" /note="2'-OMe-nucleotide"
  modified_base 18..18: /mod_base="OTHER" /note="2'-fluoro-nucleotide"
  modified_base 19..19: /mod_base="OTHER" /note="2'-OMe-nucleotide"
  modified_base 20..20: /mod_base="OTHER" /note="2'-fluoro-nucleotide"
  modified_base 21..21: /mod_base="OTHER" /note="2'-OMe-nucleotide"
  modified_base 22..22: /mod_base="OTHER" /note="2'-fluoro-nucleotide"
  modified_base 23..23: /mod_base="OTHER" /note="Inverted nucleotide"
ccaguuaagaagucuaggucugt

SEQ ID NO: 434 - DNA, 23 bp, Artificial Sequence
  Description of Artificial Sequence: Synthetic oligonucleotide
  Description of Combined DNA/RNA Molecule: Synthetic oligonucleotide
  N-term hydroxyl group
  C-term hydroxyl group
  modified_base 1..1: /mod_base="OTHER" /note="2'-OMe-nucleotide"
  modified_base 2..2: /mod_base="OTHER" /note="2'-OMe-nucleotide"
  modified_base 3..3: /mod_base="OTHER" /note="2'-OMe-nucleotide"
  modified_base 4..4: /mod_base="OTHER" /note="2'-fluoro-nucleotide"
  modified_base 5..5: /mod_base="OTHER" /note="2'-OMe-nucleotide"
  modified_base 6..6: /mod_base="OTHER" /note="2'-fluoro-nucleotide"
  modified_base 7..7: /mod_base="OTHER" /note="2'-OMe-nucleotide"
  modified_base 8..8: /mod_base="OTHER" /note="2'-fluoro-nucleotide"
  modified_base 9..9: /mod_base="OTHER" /note="2'-OMe-nucleotide"
  modified_base 10..10: /mod_base="OTHER" /note="2'-fluoro-nucleotide"
  modified_base 11..11: /mod_base="OTHER" /note="2'-OMe-nucleotide"
  modified_base 12..12: /mod_base="OTHER" /note="2'-fluoro-nucleotide"
  modified_base 13..13: /mod_base="OTHER" /note="2'-OMe-nucleotide"
  modified_base 14..14: /mod_base="OTHER" /note="2'-fluoro-nucleotide"
  modified_base 15..15: /mod_base="OTHER" /note="2'-OMe-nucleotide"
  modified_base 16..16: /mod_base="OTHER" /note="2'-fluoro-nucleotide"
  modified_base 17..17: /mod_base="OTHER" /note="2'-OMe-nucleotide"
  modified_base 18..18: /mod_base="OTHER" /note="2'-fluoro-nucleotide"
  modified_base 19..19: /mod_base="OTHER" /note="2'-OMe-nucleotide"
  modified_base 20..20: /mod_base="OTHER" /note="2'-fluoro-nucleotide"
  modified_base 21..21: /mod_base="OTHER" /note="2'-OMe-nucleotide"
  modified_base 22..22: /mod_base="OTHER" /note="2'-fluoro-nucleotide"
  modified_base 23..23: /mod_base="OTHER" /note="Inverted nucleotide"
ccauuaagaagucuaggucugct

SEQ ID NO: 435 - DNA, 23 bp, Artificial Sequence
  Description of Artificial Sequence: Synthetic oligonucleotide
  Description of Combined DNA/RNA Molecule: Synthetic oligonucleotide
  N-term hydroxyl group
  C-term hydroxyl group
  modified_base 1..1: /mod_base="OTHER" /note="2'-OMe-nucleotide"
  modified_base 2..2: /mod_base="OTHER" /note="2'-OMe-nucleotide"
  modified_base 3..3: /mod_base="OTHER" /note="2'-OMe-nucleotide"
  modified_base 4..4: /mod_base="OTHER" /note="2'-fluoro-nucleotide"
  modified_base 5..5: /mod_base="OTHER" /note="2'-OMe-nucleotide"
  modified_base 6..6: /mod_base="OTHER" /note="2'-fluoro-nucleotide"
  modified_base 7..7: /mod_base="OTHER" /note="2'-OMe-nucleotide"
  modified_base 8..8: /mod_base="OTHER" /note="2'-fluoro-nucleotide"
  modified_base 9..9: /mod_base="OTHER" /note="2'-OMe-nucleotide"
  modified_base 10..10: /mod_base="OTHER" /note="2'-fluoro-nucleotide"
  modified_base 11..11: /mod_base="OTHER" /note="2'-OMe-nucleotide"
  modified_base 12..12: /mod_base="OTHER" /note="2'-fluoro-nucleotide"
  modified_base 13..13: /mod_base="OTHER" /note="2'-OMe-nucleotide"
  modified_base 14..14: /mod_base="OTHER" /note="2'-fluoro-nucleotide"
  modified_base 15..15: /mod_base="OTHER" /note="2'-OMe-nucleotide"
  modified_base 16..16: /mod_base="OTHER" /note="2'-fluoro-nucleotide"
  modified_base 17..17: /mod_base="OTHER" /note="2'-OMe-nucleotide"
  modified_base 18..18: /mod_base="OTHER" /note="2'-fluoro-nucleotide"
  modified_base 19..19: /mod_base="OTHER" /note="2'-OMe-nucleotide"
  modified_base 20..20: /mod_base="OTHER" /note="2'-fluoro-nucleotide"
  modified_base 21..21: /mod_base="OTHER" /note="2'-OMe-nucleotide"
  modified_base 22..22: /mod_base="OTHER" /note="2'-fluoro-nucleotide"
  modified_base 23..23: /mod_base="OTHER" /note="Inverted nucleotide"
ccauaagaagucuaggucugcut

SEQ ID NO: 436 - DNA, 23 bp, Artificial Sequence
  Description of Artificial Sequence: Synthetic oligonucleotide
  Description of Combined DNA/RNA Molecule: Synthetic oligonucleotide
  N-term hydroxyl group
  C-term hydroxyl group
  modified_base 1..1: /mod_base="OTHER" /note="2'-OMe-nucleotide"
  modified_base 2..2: /mod_base="OTHER" /note="2'-OMe-nucleotide"
  modified_base 3..3: /mod_base="OTHER" /note="2'-OMe-nucleotide"
  modified_base 4..4: /mod_base="OTHER" /note="2'-fluoro-nucleotide"
  modified_base 5..5: /mod_base="OTHER" /note="2'-OMe-nucleotide"
  modified_base 6..6: /mod_base="OTHER" /note="2'-fluoro-nucleotide"
  modified_base 7..7: /mod_base="OTHER" /note="2'-OMe-nucleotide"
  modified_base 8..8: /mod_base="OTHER" /note="2'-fluoro-nucleotide"
  modified_base 9..9: /mod_base="OTHER" /note="2'-OMe-nucleotide"
  modified_base 10..10: /mod_base="OTHER" /note="2'-fluoro-nucleotide"
  modified_base 11..11: /mod_base="OTHER" /note="2'-OMe-nucleotide"
  modified_base 12..12: /mod_base="OTHER" /note="2'-fluoro-nucleotide"
  modified_base 13..13: /mod_base="OTHER" /note="2'-OMe-nucleotide"
  modified_base 14..14: /mod_base="OTHER" /note="2'-fluoro-nucleotide"
  modified_base 15..15: /mod_base="OTHER" /note="2'-OMe-nucleotide"
  modified_base 16..16: /mod_base="OTHER" /note="2'-fluoro-nucleotide"
  modified_base 17..17: /mod_base="OTHER" /note="2'-OMe-nucleotide"
  modified_base 18..18: /mod_base="OTHER" /note="2'-fluoro-nucleotide"
  modified_base 19..19: /mod_base="OTHER" /note="2'-OMe-nucleotide"
  modified_base 20..20: /mod_base="OTHER" /note="2'-fluoro-nucleotide"
  modified_base 21..21: /mod_base="OTHER" /note="2'-OMe-nucleotide"
  modified_base 22..22: /mod_base="OTHER" /note="2'-fluoro-nucleotide"
  modified_base 23..23: /mod_base="OTHER" /note="Inverted nucleotide"
ccaaagaagucuaggucugcuut

SEQ ID NO: 437 - DNA, 23 bp, Artificial Sequence
  Description of Artificial Sequence: Synthetic oligonucleotide
  Description of Combined DNA/RNA Molecule: Synthetic oligonucleotide
  N-term hydroxyl group
  C-term hydroxyl group
  modified_base 1..1: /mod_base="OTHER" /note="2'-OMe-nucleotide"
  modified_base 2..2: /mod_base="OTHER" /note="2'-OMe-nucleotide"
  modified_base 3..3: /mod_base="OTHER" /note="2'-OMe-nucleotide"
  modified_base 4..4: /mod_base="OTHER" /note="2'-fluoro-nucleotide"
  modified_base 5..5: /mod_base="OTHER" /note="2'-OMe-nucleotide"
  modified_base 6..6: /mod_base="OTHER" /note="2'-fluoro-nucleotide"
  modified_base 7..7: /mod_base="OTHER" /note="2'-OMe-nucleotide"
  modified_base 8..8: /mod_base="OTHER" /note="2'-fluoro-nucleotide"
  modified_base 9..9: /mod_base="OTHER" /note="2'-OMe-nucleotide"
  modified_base 10..10: /mod_base="OTHER" /note="2'-fluoro-nucleotide"
  modified_base 11..11: /mod_base="OTHER" /note="2'-OMe-nucleotide"
  modified_base 12..12: /mod_base="OTHER" /note="2'-fluoro-nucleotide"
  modified_base 13..13: /mod_base="OTHER" /note="2'-OMe-nucleotide"
  modified_base 14..14: /mod_base="OTHER" /note="2'-fluoro-nucleotide"
  modified_base 15..15: /mod_base="OTHER" /note="2'-OMe-nucleotide"
  modified_base 16..16: /mod_base="OTHER" /note="2'-fluoro-nucleotide"
  modified_base 17..17: /mod_base="OTHER" /note="2'-OMe-nucleotide"
  modified_base 18..18: /mod_base="OTHER" /note="2'-fluoro-nucleotide"
  modified_base 19..19: /mod_base="OTHER" /note="2'-OMe-nucleotide"
  modified_base 20..20: /mod_base="OTHER" /note="2'-fluoro-nucleotide"
  modified_base 21..21: /mod_base="OTHER" /note="2'-OMe-nucleotide"
  modified_base 22..22: /mod_base="OTHER" /note="2'-fluoro-nucleotide"
  modified_base 23..23: /mod_base="OTHER" /note="Inverted nucleotide"
ccaagaagucuaggucugcuuct

SEQ ID NO: 438 - DNA, 23 bp, Artificial Sequence
  Description of Artificial Sequence: Synthetic oligonucleotide
  Description of Combined DNA/RNA Molecule: Synthetic oligonucleotide
  N-term hydroxyl group
  C-term hydroxyl group
  modified_base 1..1: /mod_base="OTHER" /note="2'-OMe-nucleotide"
  modified_base 2..2: /mod_base="OTHER" /note="2'-OMe-nucleotide"
  modified_base 3..3: /mod_base="OTHER" /note="2'-OMe-nucleotide"
  modified_base 4..4: /mod_base="OTHER" /note="2'-fluoro-nucleotide"
  modified_base 5..5: /mod_base="OTHER" /note="2'-OMe-nucleotide"
  modified_base 6..6: /mod_base="OTHER" /note="2'-fluoro-nucleotide"
  modified_base 7..7: /mod_base="OTHER" /note="2'-OMe-nucleotide"
  modified_base 8..8: /mod_base="OTHER" /note="2'-fluoro-nucleotide"
  modified_base 9..9: /mod_base="OTHER" /note="2'-OMe-nucleotide"
  modified_base 10..10: /mod_base="OTHER" /note="2'-fluoro-nucleotide"
  modified_base 11..11: /mod_base="OTHER" /note="2'-OMe-nucleotide"
  modified_base 12..12: /mod_base="OTHER" /note="2'-fluoro-nucleotide"
  modified_base 13..13: /mod_base="OTHER" /note="2'-OMe-nucleotide"
  modified_base 14..14: /mod_base="OTHER" /note="2'-fluoro-nucleotide"
  modified_base 15..15: /mod_base="OTHER" /note="2'-OMe-nucleotide"
  modified_base 16..16: /mod_base="OTHER" /note="2'-fluoro-nucleotide"
  modified_base 17..17: /mod_base="OTHER" /note="2'-OMe-nucleotide"
  modified_base 18..18: /mod_base="OTHER" /note="2'-fluoro-nucleotide"
  modified_base 19..19: /mod_base="OTHER" /note="2'-OMe-nucleotide"
  modified_base 20..20: /mod_base="OTHER" /note="2'-fluoro-nucleotide"
  modified_base 21..21: /mod_base="OTHER" /note="2'-OMe-nucleotide"
  modified_base 22..22: /mod_base="OTHER" /note="2'-fluoro-nucleotide"
  modified_base 23..23: /mod_base="OTHER" /note="Inverted nucleotide"
ccagaagucuaggucugcuucct

SEQ ID NO: 439 - DNA, 23 bp, Artificial Sequence
  Description of Artificial Sequence: Synthetic oligonucleotide
  Description of Combined DNA/RNA Molecule: Synthetic oligonucleotide
  N-term hydroxyl group
  C-term hydroxyl group
  modified_base 1..1: /mod_base="OTHER" /note="2'-OMe-nucleotide"
  modified_base 2..2: /mod_base="OTHER" /note="2'-OMe-nucleotide"
  modified_base 3..3: /mod_base="OTHER" /note="2'-OMe-nucleotide"
  modified_base 4..4: /mod_base="OTHER" /note="2'-fluoro-nucleotide"
  modified_base 5..5: /mod_base="OTHER" /note="2'-OMe-nucleotide"
  modified_base 6..6: /mod_base="OTHER" /note="2'-fluoro-nucleotide"
  modified_base 7..7: /mod_base="OTHER" /note="2'-OMe-nucleotide"
  modified_base 8..8: /mod_base="OTHER" /note="2'-fluoro-nucleotide"
  modified_base 9..9: /mod_base="OTHER" /note="2'-OMe-nucleotide"
  modified_base 10..10: /mod_base="OTHER" /note="2'-fluoro-nucleotide"
  modified_base 11..11: /mod_base="OTHER" /note="2'-OMe-nucleotide"
  modified_base 12..12: /mod_base="OTHER" /note="2'-fluoro-nucleotide"
  modified_base 13..13: /mod_base="OTHER" /note="2'-OMe-nucleotide"
  modified_base 14..14: /mod_base="OTHER" /note="2'-fluoro-nucleotide"
  modified_base 15..15: /mod_base="OTHER" /note="2'-OMe-nucleotide"
  modified_base 16..16: /mod_base="OTHER" /note="2'-fluoro-nucleotide"
  modified_base 17..17: /mod_base="OTHER" /note="2'-OMe-nucleotide"
  modified_base 18..18: /mod_base="OTHER" /note="2'-fluoro-nucleotide"
  modified_base 19..19: /mod_base="OTHER" /note="2'-OMe-nucleotide"
  modified_base 20..20: /mod_base="OTHER" /note="2'-fluoro-nucleotide"
  modified_base 21..21: /mod_base="OTHER" /note="2'-OMe-nucleotide"
  modified_base 22..22: /mod_base="OTHER" /note="2'-fluoro-nucleotide"
  modified_base 23..23: /mod_base="OTHER" /note="Inverted nucleotide"
ccaaagucuaggucugcuuccat

SEQ ID NO: 440 - DNA, 23 bp, Artificial Sequence
  Description of Artificial Sequence: Synthetic oligonucleotide
  Description of Combined DNA/RNA Molecule: Synthetic oligonucleotide
  N-term hydroxyl group
  C-term hydroxyl group
  modified_base 1..1: /mod_base="OTHER" /note="2'-OMe-nucleotide"
  modified_base 2..2: /mod_base="OTHER" /note="2'-OMe-nucleotide"
  modified_base 3..3: /mod_base="OTHER" /note="2'-OMe-nucleotide"
  modified_base 4..4: /mod_base="OTHER" /note="2'-fluoro-nucleotide"
  modified_base 5..5: /mod_base="OTHER" /note="2'-OMe-nucleotide"
  modified_base 6..6: /mod_base="OTHER" /note="2'-fluoro-nucleotide"
  modified_base 7..7: /mod_base="OTHER" /note="2'-OMe-nucleotide"
  modified_base 8..8: /mod_base="OTHER" /note="2'-fluoro-nucleotide"
  modified_base 9..9: /mod_base="OTHER" /note="2'-OMe-nucleotide"
  modified_base 10..10: /mod_base="OTHER" /note="2'-fluoro-nucleotide"
  modified_base 11..11: /mod_base="OTHER" /note="2'-OMe-nucleotide"
  modified_base 12..12: /mod_base="OTHER" /note="2'-fluoro-nucleotide"
  modified_base 13..13: /mod_base="OTHER" /note="2'-OMe-nucleotide"
  modified_base 14..14: /mod_base="OTHER" /note="2'-fluoro-nucleotide"
  modified_base 15..15: /mod_base="OTHER" /note="2'-OMe-nucleotide"
  modified_base 16..16: /mod_base="OTHER" /note="2'-fluoro-nucleotide"
  modified_base 17..17: /mod_base="OTHER" /note="2'-OMe-nucleotide"
  modified_base 18..18: /mod_base="OTHER" /note="2'-fluoro-nucleotide"
  modified_base 19..19: /mod_base="OTHER" /note="2'-OMe-nucleotide"
  modified_base 20..20: /mod_base="OTHER" /note="2'-fluoro-nucleotide"
  modified_base 21..21: /mod_base="OTHER" /note="2'-OMe-nucleotide"
  modified_base 22..22: /mod_base="OTHER" /note="2'-fluoro-nucleotide"
  modified_base 23..23: /mod_base="OTHER" /note="Inverted nucleotide"
ccacaagacaauucaucauuugt

SEQ ID NO: 441 - DNA, 23 bp, Artificial Sequence
  Description of Artificial Sequence: Synthetic oligonucleotide
  Description of Combined DNA/RNA Molecule: Synthetic oligonucleotide
  N-term hydroxyl group
  C-term hydroxyl group
  modified_base 1..1: /mod_base="OTHER" /note="2'-OMe-nucleotide"
  modified_base 2..2: /mod_base="OTHER" /note="2'-OMe-nucleotide"
  modified_base 3..3: /mod_base="OTHER" /note="2'-OMe-nucleotide"
  modified_base 4..4: /mod_base="OTHER" /note="2'-fluoro-nucleotide"
  modified_base 5..5: /mod_base="OTHER" /note="2'-OMe-nucleotide"
  modified_base 6..6: /mod_base="OTHER" /note="2'-fluoro-nucleotide"
  modified_base 7..7: /mod_base="OTHER" /note="2'-OMe-nucleotide"
  modified_base 8..8: /mod_base="OTHER" /note="2'-fluoro-nucleotide"
  modified_base 9..9: /mod_base="OTHER" /note="2'-OMe-nucleotide"
  modified_base 10..10: /mod_base="OTHER" /note="2'-fluoro-nucleotide"
  modified_base 11..11: /mod_base="OTHER" /note="2'-OMe-nucleotide"
  modified_base 12..12: /mod_base="OTHER" /note="2'-fluoro-nucleotide"
  modified_base 13..13: /mod_base="OTHER" /note="2'-OMe-nucleotide"
  modified_base 14..14: /mod_base="OTHER" /note="2'-fluoro-nucleotide"
  modified_base 15..15: /mod_base="OTHER" /note="2'-OMe-nucleotide"
  modified_base 16..16: /mod_base="OTHER" /note="2'-fluoro-nucleotide"
  modified_base 17..17: /mod_base="OTHER" /note="2'-OMe-nucleotide"
  modified_base 18..18: /mod_base="OTHER" /note="2'-fluoro-nucleotide"
  modified_base 19..19: /mod_base="OTHER" /note="2'-OMe-nucleotide"
  modified_base 20..20: /mod_base="OTHER" /note="2'-fluoro-nucleotide"
  modified_base 21..21: /mod_base="OTHER" /note="2'-OMe-nucleotide"
  modified_base 22..22: /mod_base="OTHER" /note="2'-fluoro-nucleotide"
  modified_base 23..23: /mod_base="OTHER" /note="Inverted nucleotide"
ccaagacaauucaucauuugaut

SEQ ID NO: 442 - DNA, 23 bp, Artificial Sequence
  Description of Artificial Sequence: Synthetic oligonucleotide
  Description of Combined DNA/RNA Molecule: Synthetic oligonucleotide
  N-term hydroxyl group
  C-term hydroxyl group
  modified_base 1..1: /mod_base="OTHER" /note="2'-OMe-nucleotide"
  modified_base 2..2: /mod_base="OTHER" /note="2'-OMe-nucleotide"
  modified_base 3..3: /mod_base="OTHER" /note="2'-OMe-nucleotide"
  modified_base 4..4: /mod_base="OTHER" /note="2'-fluoro-nucleotide"
  modified_base 5..5: /mod_base="OTHER" /note="2'-OMe-nucleotide"
  modified_base 6..6: /mod_base="OTHER" /note="2'-fluoro-nucleotide"
  modified_base 7..7: /mod_base="OTHER" /note="2'-OMe-nucleotide"
  modified_base 8..8: /mod_base="OTHER" /note="2'-fluoro-nucleotide"
  modified_base 9..9: /mod_base="OTHER" /note="2'-OMe-nucleotide"
  modified_base 10..10: /mod_base="OTHER" /note="2'-fluoro-nucleotide"
  modified_base 11..11: /mod_base="OTHER" /note="2'-OMe-nucleotide"
  modified_base 12..12: /mod_base="OTHER" /note="2'-fluoro-nucleotide"
  modified_base 13..13: /mod_base="OTHER" /note="2'-OMe-nucleotide"
  modified_base 14..14: /mod_base="OTHER" /note="2'-fluoro-nucleotide"
  modified_base 15..15: /mod_base="OTHER" /note="2'-OMe-nucleotide"
  modified_base 16..16: /mod_base="OTHER" /note="2'-fluoro-nucleotide"
  modified_base 17..17: /mod_base="OTHER" /note="2'-OMe-nucleotide"
  modified_base 18..18: /mod_base="OTHER" /note="2'-fluoro-nucleotide"
  modified_base 19..19: /mod_base="OTHER" /note="2'-OMe-nucleotide"
  modified_base 20..20: /mod_base="OTHER" /note="2'-fluoro-nucleotide"
  modified_base 21..21: /mod_base="OTHER" /note="2'-OMe-nucleotide"
  modified_base 22..22: /mod_base="OTHER" /note="2'-fluoro-nucleotide"
  modified_base 23..23: /mod_base="OTHER" /note="Inverted nucleotide"
ccagacaauucaucauuugauut

SEQ ID NO: 443 - DNA, 23 bp, Artificial Sequence
  Description of Artificial Sequence: Synthetic oligonucleotide
  Description of Combined DNA/RNA Molecule: Synthetic oligonucleotide
  N-term hydroxyl group
  C-term hydroxyl group
  modified_base 1..1: /mod_base="OTHER" /note="2'-OMe-nucleotide"
  modified_base 2..2: /mod_base="OTHER" /note="2'-OMe-nucleotide"
  modified_base 3..3: /mod_base="OTHER" /note="2'-OMe-nucleotide"
  modified_base 4..4: /mod_base="OTHER" /note="2'-fluoro-nucleotide"
  modified_base 5..5: /mod_base="OTHER" /note="2'-OMe-nucleotide"
  modified_base 6..6: /mod_base="OTHER" /note="2'-fluoro-nucleotide"
  modified_base 7..7: /mod_base="OTHER" /note="2'-OMe-nucleotide"
  modified_base 8..8: /mod_base="OTHER" /note="2'-fluoro-nucleotide"
  modified_base 9..9: /mod_base="OTHER" /note="2'-OMe-nucleotide"
  modified_base 10..10: /mod_base="OTHER" /note="2'-fluoro-nucleotide"
  modified_base 11..11: /mod_base="OTHER" /note="2'-OMe-nucleotide"
  modified_base 12..12: /mod_base="OTHER" /note="2'-fluoro-nucleotide"
  modified_base 13..13: /mod_base="OTHER" /note="2'-OMe-nucleotide"
  modified_base 14..14: /mod_base="OTHER" /note="2'-fluoro-nucleotide"
  modified_base 15..15: /mod_base="OTHER" /note="2'-OMe-nucleotide"
  modified_base 16..16: /mod_base="OTHER" /note="2'-fluoro-nucleotide"
  modified_base 17..17: /mod_base="OTHER" /note="2'-OMe-nucleotide"
  modified_base 18..18: /mod_base="OTHER" /note="2'-fluoro-nucleotide"
  modified_base 19..19: /mod_base="OTHER" /note="2'-OMe-nucleotide"
  modified_base 20..20: /mod_base="OTHER" /note="2'-fluoro-nucleotide"
  modified_base 21..21: /mod_base="OTHER" /note="2'-OMe-nucleotide"
  modified_base 22..22: /mod_base="OTHER" /note="2'-fluoro-nucleotide"
  modified_base 23..23: /mod_base="OTHER" /note="Inverted nucleotide"
ccaacaauucaucauuugauuct

SEQ ID NO: 444 - DNA, 23 bp, Artificial Sequence
  Description of Artificial Sequence: Synthetic oligonucleotide
  Description of Combined DNA/RNA Molecule: Synthetic oligonucleotide
  N-term hydroxyl group
  C-term hydroxyl group
  modified_base 1..1: /mod_base="OTHER" /note="2'-OMe-nucleotide"
  modified_base 2..2: /mod_base="OTHER" /note="2'-OMe-nucleotide"
  modified_base 3..3: /mod_base="OTHER" /note="2'-OMe-nucleotide"
  modified_base 4..4: /mod_base="OTHER" /note="2'-fluoro-nucleotide"
  modified_base 5..5: /mod_base="OTHER" /note="2'-OMe-nucleotide"
  modified_base 6..6: /mod_base="OTHER" /note="2'-fluoro-nucleotide"
  modified_base 7..7: /mod_base="OTHER" /note="2'-OMe-nucleotide"
  modified_base 8..8: /mod_base="OTHER" /note="2'-fluoro-nucleotide"
  modified_base 9..9: /mod_base="OTHER" /note="2'-OMe-nucleotide"
  modified_base 10..10: /mod_base="OTHER" /note="2'-fluoro-nucleotide"
  modified_base 11..11: /mod_base="OTHER" /note="2'-OMe-nucleotide"
  modified_base 12..12: /mod_base="OTHER" /note="2'-fluoro-nucleotide"
  modified_base 13..13: /mod_base="OTHER" /note="2'-OMe-nucleotide"
  modified_base 14..14: /mod_base="OTHER" /note="2'-fluoro-nucleotide"
  modified_base 15..15: /mod_base="OTHER" /note="2'-OMe-nucleotide"
  modified_base 16..16: /mod_base="OTHER" /note="2'-fluoro-nucleotide"
  modified_base 17..17: /mod_base="OTHER" /note="2'-OMe-nucleotide"
  modified_base 18..18: /mod_base="OTHER" /note="2'-fluoro-nucleotide"
  modified_base 19..19: /mod_base="OTHER" /note="2'-OMe-nucleotide"
  modified_base 20..20: /mod_base="OTHER" /note="2'-fluoro-nucleotide"
  modified_base 21..21: /mod_base="OTHER" /note="2'-OMe-nucleotide"
  modified_base 22..22: /mod_base="OTHER" /note="2'-fluoro-nucleotide"
  modified_base 23..23: /mod_base="OTHER" /note="Inverted nucleotide"
ccagcaucaaagaccuucuccat

SEQ ID NO: 445 - DNA, 23 bp, Artificial Sequence
  Description of Artificial Sequence: Synthetic oligonucleotide
  Description of Combined DNA/RNA Molecule: Synthetic oligonucleotide
  N-term hydroxyl group
  C-term hydroxyl group
  modified_base 1..1: /mod_base="OTHER" /note="2'-OMe-nucleotide"
  modified_base 2..2: /mod_base="OTHER" /note="2'-OMe-nucleotide"
  modified_base 3..3: /mod_base="OTHER" /note="2'-OMe-nucleotide"
  modified_base 4..4: /mod_base="OTHER" /note="2'-fluoro-nucleotide"
  modified_base 5..5: /mod_base="OTHER" /note="2'-OMe-nucleotide"
  modified_base 6..6: /mod_base="OTHER" /note="2'-fluoro-nucleotide"
  modified_base 7..7: /mod_base="OTHER" /note="2'-OMe-nucleotide"
  modified_base 8..8: /mod_base="OTHER" /note="2'-fluoro-nucleotide"
  modified_base 9..9: /mod_base="OTHER" /note="2'-OMe-nucleotide"
  modified_base 10..10: /mod_base="OTHER" /note="2'-fluoro-nucleotide"
  modified_base 11..11: /mod_base="OTHER" /note="2'-OMe-nucleotide"
  modified_base 12..12: /mod_base="OTHER" /note="2'-fluoro-nucleotide"
  modified_base 13..13: /mod_base="OTHER" /note="2'-OMe-nucleotide"
  modified_base 14..14: /mod_base="OTHER" /note="2'-fluoro-nucleotide"
  modified_base 15..15: /mod_base="OTHER" /note="2'-OMe-nucleotide"
  modified_base 16..16: /mod_base="OTHER" /note="2'-fluoro-nucleotide"
  modified_base 17..17: /mod_base="OTHER" /note="2'-OMe-nucleotide"
  modified_base 18..18: /mod_base="OTHER" /note="2'-fluoro-nucleotide"
  modified_base 19..19: /mod_base="OTHER" /note="2'-OMe-nucleotide"
  modified_base 20..20: /mod_base="OTHER" /note="2'-fluoro-nucleotide"
  modified_base 21..21: /mod_base="OTHER" /note="2'-OMe-nucleotide"
  modified_base 22..22: /mod_base="OTHER" /note="2'-fluoro-nucleotide"
  modified_base 23..23: /mod_base="OTHER" /note="Inverted nucleotide"
ccaauuucucuaucuuccaagct

SEQ ID NO: 446 - DNA, 23 bp, Artificial Sequence
  Description of Artificial Sequence: Synthetic oligonucleotide
  Description of Combined DNA/RNA Molecule: Synthetic oligonucleotide
  N-term hydroxyl group
  C-term hydroxyl group
  modified_base 1..1: /mod_base="OTHER" /note="2'-OMe-nucleotide"
  modified_base 2..2: /mod_base="OTHER" /note="2'-OMe-nucleotide"
  modified_base 3..3: /mod_base="OTHER" /note="2'-OMe-nucleotide"
  modified_base 4..4: /mod_base="OTHER" /note="2'-fluoro-nucleotide"
  modified_base 5..5: /mod_base="OTHER" /note="2'-OMe-nucleotide"
  modified_base 6..6: /mod_base="OTHER" /note="2'-fluoro-nucleotide"
  modified_base 7..7: /mod_base="OTHER" /note="2'-OMe-nucleotide"
  modified_base 8..8: /mod_base="OTHER" /note="2'-fluoro-nucleotide"
  modified_base 9..9: /mod_base="OTHER" /note="2'-OMe-nucleotide"
  modified_base 10..10: /mod_base="OTHER" /note="2'-fluoro-nucleotide"
  modified_base 11..11: /mod_base="OTHER" /note="2'-OMe-nucleotide"
  modified_base 12..12: /mod_base="OTHER" /note="2'-fluoro-nucleotide"
  modified_base 13..13: /mod_base="OTHER" /note="2'-OMe-nucleotide"
  modified_base 14..14: /mod_base="OTHER" /note="2'-fluoro-nucleotide"
  modified_base 15..15: /mod_base="OTHER" /note="2'-OMe-nucleotide"
  modified_base 16..16: /mod_base="OTHER" /note="2'-fluoro-nucleotide"
  modified_base 17..17: /mod_base="OTHER" /note="2'-OMe-nucleotide"
  modified_base 18..18: /mod_base="OTHER" /note="2'-fluoro-nucleotide"
  modified_base 19..19: /mod_base="OTHER" /note="2'-OMe-nucleotide"
  modified_base 20..20: /mod_base="OTHER" /note="2'-fluoro-nucleotide"
  modified_base 21..21: /mod_base="OTHER" /note="2'-OMe-nucleotide"
  modified_base 22..22: /mod_base="OTHER" /note="2'-fluoro-nucleotide"
  modified_base 23..23: /mod_base="OTHER" /note="Inverted nucleotide"
ccaucucuaucuuccaagccaat

SEQ ID NO: 447 - DNA, 23 bp, Artificial Sequence
  Description of Artificial Sequence: Synthetic oligonucleotide
  Description of Combined DNA/RNA Molecule: Synthetic oligonucleotide
  N-term hydroxyl group
  C-term hydroxyl group
  modified_base 1..1: /mod_base="OTHER" /note="2'-OMe-nucleotide"
  modified_base 2..2: /mod_base="OTHER" /note="2'-OMe-nucleotide"
  modified_base 3..3: /mod_base="OTHER" /note="2'-OMe-nucleotide"
  modified_base 4..4: /mod_base="OTHER" /note="2'-fluoro-nucleotide"
  modified_base 5..5: /mod_base="OTHER" /note="2'-OMe-nucleotide"
  modified_base 6..6: /mod_base="OTHER" /note="2'-fluoro-nucleotide"
  modified_base 7..7: /mod_base="OTHER" /note="2'-OMe-nucleotide"
  modified_base 8..8: /mod_base="OTHER" /note="2'-fluoro-nucleotide"
  modified_base 9..9: /mod_base="OTHER" /note="2'-OMe-nucleotide"
  modified_base 10..10: /mod_base="OTHER" /note="2'-fluoro-nucleotide"
  modified_base 11..11: /mod_base="OTHER" /note="2'-OMe-nucleotide"
  modified_base 12..12: /mod_base="OTHER" /note="2'-fluoro-nucleotide"
  modified_base 13..13: /mod_base="OTHER" /note="2'-OMe-nucleotide"
  modified_base 14..14: /mod_base="OTHER" /note="2'-fluoro-nucleotide"
  modified_base 15..15: /mod_base="OTHER" /note="2'-OMe-nucleotide"
  modified_base 16..16: /mod_base="OTHER" /note="2'-fluoro-nucleotide"
  modified_base 17..17: /mod_base="OTHER" /note="2'-OMe-nucleotide"
  modified_base 18..18: /mod_base="OTHER" /note="2'-fluoro-nucleotide"
  modified_base 19..19: /mod_base="OTHER" /note="2'-OMe-nucleotide"
  modified_base 20..20: /mod_base="OTHER" /note="2'-fluoro-nucleotide"
  modified_base 21..21: /mod_base="OTHER" /note="2'-OMe-nucleotide"
  modified_base 22..22: /mod_base="OTHER" /note="2'-fluoro-nucleotide"
  modified_base 23..23: /mod_base="OTHER" /note="Inverted nucleotide"
ccacucuaucuuccaagccaagt

SEQ ID NO: 448 - DNA, 23 bp, Artificial Sequence
  Description of Artificial Sequence: Synthetic oligonucleotide
  Description of Combined DNA/RNA Molecule: Synthetic oligonucleotide
  N-term hydroxyl group
  C-term hydroxyl group
  modified_base 1..1: /mod_base="OTHER" /note="2'-OMe-nucleotide"
  modified_base 2..2: /mod_base="OTHER" /note="2'-OMe-nucleotide"
  modified_base 3..3: /mod_base="OTHER" /note="2'-OMe-nucleotide"
  modified_base 4..4: /mod_base="OTHER" /note="2'-fluoro-nucleotide"
  modified_base 5..5: /mod_base="OTHER" /note="2'-OMe-nucleotide"
  modified_base 6..6: /mod_base="OTHER" /note="2'-fluoro-nucleotide"
  modified_base 7..7: /mod_base="OTHER" /note="2'-OMe-nucleotide"
  modified_base 8..8: /mod_base="OTHER" /note="2'-fluoro-nucleotide"
  modified_base 9..9: /mod_base="OTHER" /note="2'-OMe-nucleotide"
  modified_base 10..10: /mod_base="OTHER" /note="2'-fluoro-nucleotide"
  modified_base 11..11: /mod_base="OTHER" /note="2'-OMe-nucleotide"
  modified_base 12..12: /mod_base="OTHER" /note="2'-fluoro-nucleotide"
  modified_base 13..13: /mod_base="OTHER" /note="2'-OMe-nucleotide"
  modified_base 14..14: /mod_base="OTHER" /note="2'-fluoro-nucleotide"
  modified_base 15..15: /mod_base="OTHER" /note="2'-OMe-nucleotide"
  modified_base 16..16: /mod_base="OTHER" /note="2'-fluoro-nucleotide"
  modified_base 17..17: /mod_base="OTHER" /note="2'-OMe-nucleotide"
  modified_base 18..18: /mod_base="OTHER" /note="2'-fluoro-nucleotide"
  modified_base 19..19: /mod_base="OTHER" /note="2'-OMe-nucleotide"
  modified_base 20..20: /mod_base="OTHER" /note="2'-fluoro-nucleotide"
  modified_base 21..21: /mod_base="OTHER" /note="2'-OMe-nucleotide"
  modified_base 22..22: /mod_base="OTHER" /note="2'-fluoro-nucleotide"
  modified_base 23..23: /mod_base="OTHER" /note="Inverted nucleotide"
ccaucuaucuuccaagccaagat

SEQ ID NO: 449 - DNA, 23 bp, Artificial Sequence
  Description of Artificial Sequence: Synthetic oligonucleotide
  Description of Combined DNA/RNA Molecule: Synthetic oligonucleotide
  N-term hydroxyl group
  C-term hydroxyl group
  modified_base 1..1: /mod_base="OTHER" /note="2'-OMe-nucleotide"
  modified_base 2..2: /mod_base="OTHER" /note="2'-OMe-nucleotide"
  modified_base 3..3: /mod_base="OTHER" /note="2'-OMe-nucleotide"
  modified_base 4..4: /mod_base="OTHER" /note="2'-fluoro-nucleotide"
  modified_base 5..5: /mod_base="OTHER" /note="2'-OMe-nucleotide"
  modified_base 6..6: /mod_base="OTHER" /note="2'-fluoro-nucleotide"
  modified_base 7..7: /mod_base="OTHER" /note="2'-OMe-nucleotide"
  modified_base 8..8: /mod_base="OTHER" /note="2'-fluoro-nucleotide"
  modified_base 9..9: /mod_base="OTHER" /note="2'-OMe-nucleotide"
  modified_base 10..10: /mod_base="OTHER" /note="2'-fluoro-nucleotide"
  modified_base 11..11: /mod_base="OTHER" /note="2'-OMe-nucleotide"
  modified_base 12..12: /mod_base="OTHER" /note="2'-fluoro-nucleotide"
  modified_base 13..13: /mod_base="OTHER" /note="2'-OMe-nucleotide"
  modified_base 14..14: /mod_base="OTHER" /note="2'-fluoro-nucleotide"
  modified_base 15..15: /mod_base="OTHER" /note="2'-OMe-nucleotide"
  modified_base 16..16: /mod_base="OTHER" /note="2'-fluoro-nucleotide"
  modified_base 17..17: /mod_base="OTHER" /note="2'-OMe-nucleotide"
  modified_base 18..18: /mod_base="OTHER" /note="2'-fluoro-nucleotide"
  modified_base 19..19: /mod_base="OTHER" /note="2'-OMe-nucleotide"
  modified_base 20..20: /mod_base="OTHER" /note="2'-fluoro-nucleotide"
  modified_base 21..21: /mod_base="OTHER" /note="2'-OMe-nucleotide"
  modified_base 22..22: /mod_base="OTHER" /note="2'-fluoro-nucleotide"
  modified_base 23..23: /mod_base="OTHER" /note="Inverted nucleotide"
ccacuaucuuccaagccaagagt

SEQ ID NO: 450 - DNA, 23 bp, Artificial Sequence
  Description of Artificial Sequence: Synthetic oligonucleotide
  Description of Combined DNA/RNA Molecule: Synthetic oligonucleotide
  N-term hydroxyl group
  C-term hydroxyl group
  modified_base 1..1: /mod_base="OTHER" /note="2'-OMe-nucleotide"
  modified_base 2..2: /mod_base="OTHER" /note="2'-OMe-nucleotide"
  modified_base 3..3: /mod_base="OTHER" /note="2'-OMe-nucleotide"
  modified_base 4..4: /mod_base="OTHER" /note="2'-fluoro-nucleotide"
  modified_base 5..5: /mod_base="OTHER" /note="2'-OMe-nucleotide"
  modified_base 6..6: /mod_base="OTHER" /note="2'-fluoro-nucleotide"
  modified_base 7..7: /mod_base="OTHER" /note="2'-OMe-nucleotide"
  modified_base 8..8: /mod_base="OTHER" /note="2'-fluoro-nucleotide"
  modified_base 9..9: /mod_base="OTHER" /note="2'-OMe-nucleotide"
  modified_base 10..10: /mod_base="OTHER" /note="2'-fluoro-nucleotide"
  modified_base 11..11: /mod_base="OTHER" /note="2'-OMe-nucleotide"
  modified_base 12..12: /mod_base="OTHER" /note="2'-fluoro-nucleotide"
  modified_base 13..13: /mod_base="OTHER" /note="2'-OMe-nucleotide"
  modified_base 14..14: /mod_base="OTHER" /note="2'-fluoro-nucleotide"
  modified_base 15..15: /mod_base="OTHER" /note="2'-OMe-nucleotide"
  modified_base 16..16: /mod_base="OTHER" /note="2'-fluoro-nucleotide"
  modified_base 17..17: /mod_base="OTHER" /note="2'-OMe-nucleotide"
  modified_base 18..18: /mod_base="OTHER" /note="2'-fluoro-nucleotide"
  modified_base 19..19: /mod_base="OTHER" /note="2'-OMe-nucleotide"
  modified_base 20..20: /mod_base="OTHER" /note="2'-fluoro-nucleotide"
  modified_base 21..21: /mod_base="OTHER" /note="2'-OMe-nucleotide"
  modified_base 22..22: /mod_base="OTHER" /note="2'-fluoro-nucleotide"
  modified_base 23..23: /mod_base="OTHER" /note="Inverted nucleotide"
ccacaagaacuacucccuuucut

SEQ ID NO: 451 - DNA, 23 bp, Artificial Sequence
  Description of Artificial Sequence: Synthetic oligonucleotide
  Description of Combined DNA/RNA Molecule: Synthetic oligonucleotide
  N-term hydroxyl group
  C-term hydroxyl group
  modified_base 1..1: /mod_base="OTHER" /note="2'-OMe-nucleotide"
  modified_base 2..2: /mod_base="OTHER" /note="2'-OMe-nucleotide"
  modified_base 3..3: /mod_base="OTHER" /note="2'-OMe-nucleotide"
  modified_base 4..4: /mod_base="OTHER" /note="2'-fluoro-nucleotide"
  modified_base 5..5: /mod_base="OTHER" /note="2'-OMe-nucleotide"
  modified_base 6..6: /mod_base="OTHER" /note="2'-fluoro-nucleotide"
  modified_base 7..7: /mod_base="OTHER" /note="2'-OMe-nucleotide"
  modified_base 8..8: /mod_base="OTHER" /note="2'-fluoro-nucleotide"
  modified_base 9..9: /mod_base="OTHER" /note="2'-OMe-nucleotide"
  modified_base 10..10: /mod_base="OTHER" /note="2'-fluoro-nucleotide"
  modified_base 11..11: /mod_base="OTHER" /note="2'-OMe-nucleotide"
  modified_base 12..12: /mod_base="OTHER" /note="2'-fluoro-nucleotide"
  modified_base 13..13: /mod_base="OTHER" /note="2'-OMe-nucleotide"
  modified_base 14..14: /mod_base="OTHER" /note="2'-fluoro-nucleotide"
  modified_base 15..15: /mod_base="OTHER" /note="2'-OMe-nucleotide"
  modified_base 16..16: /mod_base="OTHER" /note="2'-fluoro-nucleotide"
  modified_base 17..17: /mod_base="OTHER" /note="2'-OMe-nucleotide"
  modified_base 18..18: /mod_base="OTHER" /note="2'-fluoro-nucleotide"
  modified_base 19..19: /mod_base="OTHER" /note="2'-OMe-nucleotide"
  modified_base 20..20: /mod_base="OTHER" /note="2'-fluoro-nucleotide"
  modified_base 21..21: /mod_base="OTHER" /note="2'-OMe-nucleotide"
  modified_base 22..22: /mod_base="OTHER" /note="2'-fluoro-nucleotide"
  modified_base 23..23: /mod_base="OTHER" /note="Inverted nucleotide"
ccaagaacuacucccuuucuuct

SEQ ID NO: 452 - DNA, 23 bp, Artificial Sequence
  Description of Artificial Sequence: Synthetic oligonucleotide
  Description of Combined DNA/RNA Molecule: Synthetic oligonucleotide
  N-term hydroxyl group
  C-term hydroxyl group
  modified_base 1..1: /mod_base="OTHER" /note="2'-OMe-nucleotide"
  modified_base 2..2: /mod_base="OTHER" /note="2'-OMe-nucleotide"
  modified_base 3..3: /mod_base="OTHER" /note="2'-OMe-nucleotide"
  modified_base 4..4: /mod_base="OTHER" /note="2'-fluoro-nucleotide"
  modified_base 5..5: /mod_base="OTHER" /note="2'-OMe-nucleotide"
  modified_base 6..6: /mod_base="OTHER" /note="2'-fluoro-nucleotide"
  modified_base 7..7: /mod_base="OTHER" /note="2'-OMe-nucleotide"
  modified_base 8..8: /mod_base="OTHER" /note="2'-fluoro-nucleotide"
  modified_base 9..9: /mod_base="OTHER" /note="2'-OMe-nucleotide"
  modified_base 10..10: /mod_base="OTHER" /note="2'-fluoro-nucleotide"
  modified_base 11..11: /mod_base="OTHER" /note="2'-OMe-nucleotide"
  modified_base 12..12: /mod_base="OTHER" /note="2'-fluoro-nucleotide"
  modified_base 13..13: /mod_base="OTHER" /note="2'-OMe-nucleotide"
  modified_base 14..14: /mod_base="OTHER" /note="2'-fluoro-nucleotide"
  modified_base 15..15: /mod_base="OTHER" /note="2'-OMe-nucleotide"
  modified_base 16..16: /mod_base="OTHER" /note="2'-fluoro-nucleotide"
  modified_base 17..17: /mod_base="OTHER" /note="2'-OMe-nucleotide"
  modified_base 18..18: /mod_base="OTHER" /note="2'-fluoro-nucleotide"
  modified_base 19..19: /mod_base="OTHER" /note="2'-OMe-nucleotide"
  modified_base 20..20: /mod_base="OTHER" /note="2'-fluoro-nucleotide"
  modified_base 21..21: /mod_base="OTHER" /note="2'-OMe-nucleotide"
  modified_base 22..22: /mod_base="OTHER" /note="2'-fluoro-nucleotide"
  modified_base 23..23: /mod_base="OTHER" /note="Inverted nucleotide"
ccagaacuacucccuuucuucat

SEQ ID NO: 453 - DNA, 23 bp, Artificial Sequence
  Description of Artificial Sequence: Synthetic oligonucleotide
  Description of Combined DNA/RNA Molecule: Synthetic oligonucleotide
  N-term hydroxyl group
  C-term hydroxyl group
  modified_base 1..1: /mod_base="OTHER" /note="2'-OMe-nucleotide"
  modified_base 2..2: /mod_base="OTHER" /note="2'-OMe-nucleotide"
  modified_base 3..3: /mod_base="OTHER" /note="2'-OMe-nucleotide"
  modified_base 4..4: /mod_base="OTHER" /note="2'-fluoro-nucleotide"
  modified_base 5..5: /mod_base="OTHER" /note="2'-OMe-nucleotide"
  modified_base 6..6: /mod_base="OTHER" /note="2'-fluoro-nucleotide"
  modified_base 7..7: /mod_base="OTHER" /note="2'-OMe-nucleotide"
  modified_base 8..8: /mod_base="OTHER" /note="2'-fluoro-nucleotide"
  modified_base 9..9: /mod_base="OTHER" /note="2'-OMe-nucleotide"
  modified_base 10..10: /mod_base="OTHER" /note="2'-fluoro-nucleotide"
  modified_base 11..11: /mod_base="OTHER" /note="2'-OMe-nucleotide"
  modified_base 12..12: /mod_base="OTHER" /note="2'-fluoro-nucleotide"
  modified_base 13..13: /mod_base="OTHER" /note="2'-OMe-nucleotide"
  modified_base 14..14: /mod_base="OTHER" /note="2'-fluoro-nucleotide"
  modified_base 15..15: /mod_base="OTHER" /note="2'-OMe-nucleotide"
  modified_base 16..16: /mod_base="OTHER" /note="2'-fluoro-nucleotide"
  modified_base 17..17: /mod_base="OTHER" /note="2'-OMe-nucleotide"
  modified_base 18..18: /mod_base="OTHER" /note="2'-fluoro-nucleotide"
  modified_base 19..19: /mod_base="OTHER" /note="2'-OMe-nucleotide"
  modified_base 20..20: /mod_base="OTHER" /note="2'-fluoro-nucleotide"
  modified_base 21..21: /mod_base="OTHER" /note="2'-OMe-nucleotide"
  modified_base 22..22: /mod_base="OTHER" /note="2'-fluoro-nucleotide"
  modified_base 23..23: /mod_base="OTHER" /note="Inverted nucleotide"
ccaaacuacucccuuucuucagt

SEQ ID NO: 454 - DNA, 23 bp, Artificial Sequence
  Description of Artificial Sequence: Synthetic oligonucleotide
  Description of Combined DNA/RNA Molecule: Synthetic oligonucleotide
  N-term hydroxyl group
  C-term hydroxyl group
  modified_base 1..1: /mod_base="OTHER" /note="2'-OMe-nucleotide"
  modified_base 2..2: /mod_base="OTHER" /note="2'-OMe-nucleotide"
  modified_base 3..3: /mod_base="OTHER" /note="2'-OMe-nucleotide"
  modified_base 4..4: /mod_base="OTHER" /note="2'-fluoro-nucleotide"
  modified_base 5..5: /mod_base="OTHER" /note="2'-OMe-nucleotide"
  modified_base 6..6: /mod_base="OTHER" /note="2'-fluoro-nucleotide"
  modified_base 7..7: /mod_base="OTHER" /note="2'-OMe-nucleotide"
  modified_base 8..8: /mod_base="OTHER" /note="2'-fluoro-nucleotide"
  modified_base 9..9: /mod_base="OTHER" /note="2'-OMe-nucleotide"
  modified_base 10..10: /mod_base="OTHER" /note="2'-fluoro-nucleotide"
  modified_base 11..11: /mod_base="OTHER" /note="2'-OMe-nucleotide"
  modified_base 12..12: /mod_base="OTHER" /note="2'-fluoro-nucleotide"
  modified_base 13..13: /mod_base="OTHER" /note="2'-OMe-nucleotide"
  modified_base 14..14: /mod_base="OTHER" /note="2'-fluoro-nucleotide"
  modified_base 15..15: /mod_base="OTHER" /note="2'-OMe-nucleotide"
  modified_base 16..16: /mod_base="OTHER" /note="2'-fluoro-nucleotide"
  modified_base 17..17: /mod_base="OTHER" /note="2'-OMe-nucleotide"
  modified_base 18..18: /mod_base="OTHER" /note="2'-fluoro-nucleotide"
  modified_base 19..19: /mod_base="OTHER" /note="2'-OMe-nucleotide"
  modified_base 20..20: /mod_base="OTHER" /note="2'-fluoro-nucleotide"
  modified_base 21..21: /mod_base="OTHER" /note="2'-OMe-nucleotide"
  modified_base 22..22: /mod_base="OTHER" /note="2'-fluoro-nucleotide"
  modified_base 23..23: /mod_base="OTHER" /note="Inverted nucleotide"
ccaaaauguaaaacaugauggct

SEQ ID NO: 455 - DNA, 23 bp, Artificial Sequence
  Description of Artificial Sequence: Synthetic oligonucleotide
  Description of Combined DNA/RNA Molecule: Synthetic oligonucleotide
  N-term hydroxyl group
  C-term hydroxyl group
  modified_base 1..1: /mod_base="OTHER" /note="2'-OMe-nucleotide"
  modified_base 2..2: /mod_base="OTHER" /note="2'-OMe-nucleotide"
  modified_base 3..3: /mod_base="OTHER" /note="2'-OMe-nucleotide"
  modified_base 4..4: /mod_base="OTHER" /note="2'-fluoro-nucleotide"
  modified_base 5..5: /mod_base="OTHER" /note="2'-OMe-nucleotide"
  modified_base 6..6: /mod_base="OTHER" /note="2'-fluoro-nucleotide"
  modified_base 7..7: /mod_base="OTHER" /note="2'-OMe-nucleotide"
  modified_base 8..8: /mod_base="OTHER" /note="2'-fluoro-nucleotide"
  modified_base 9..9: /mod_base="OTHER" /note="2'-OMe-nucleotide"
  modified_base 10..10: /mod_base="OTHER" /note="2'-fluoro-nucleotide"
  modified_base 11..11: /mod_base="OTHER" /note="2'-OMe-nucleotide"
  modified_base 12..12: /mod_base="OTHER" /note="2'-fluoro-nucleotide"
  modified_base 13..13: /mod_base="OTHER" /note="2'-OMe-nucleotide"
  modified_base 14..14: /mod_base="OTHER" /note="2'-fluoro-nucleotide"
  modified_base 15..15: /mod_base="OTHER" /note="2'-OMe-nucleotide"
  modified_base 16..16: /mod_base="OTHER" /note="2'-fluoro-nucleotide"
  modified_base 17..17: /mod_base="OTHER" /note="2'-OMe-nucleotide"
  modified_base 18..18: /mod_base="OTHER" /note="2'-fluoro-nucleotide"
  modified_base 19..19: /mod_base="OTHER" /note="2'-OMe-nucleotide"
  modified_base 20..20: /mod_base="OTHER" /note="2'-fluoro-nucleotide"
  modified_base 21..21: /mod_base="OTHER" /note="2'-OMe-nucleotide"
  modified_base 22..22: /mod_base="OTHER" /note="2'-fluoro-nucleotide"
  modified_base 23..23: /mod_base="OTHER" /note="Inverted nucleotide"
ccaaauguaaaacaugauggcat

SEQ ID NO: 456 - DNA, 23 bp, Artificial Sequence
  Description of Artificial Sequence: Synthetic oligonucleotide
  Description of Combined DNA/RNA Molecule: Synthetic oligonucleotide
  N-term hydroxyl group
  C-term hydroxyl group
  modified_base 1..1: /mod_base="OTHER" /note="2'-OMe-nucleotide"
  modified_base 2..2: /mod_base="OTHER" /note="2'-OMe-nucleotide"
  modified_base 3..3: /mod_base="OTHER" /note="2'-OMe-nucleotide"
  modified_base 4..4: /mod_base="OTHER" /note="2'-fluoro-nucleotide"
  modified_base 5..5: /mod_base="OTHER" /note="2'-OMe-nucleotide"
  modified_base 6..6: /mod_base="OTHER" /note="2'-fluoro-nucleotide"
  modified_base 7..7: /mod_base="OTHER" /note="2'-OMe-nucleotide"
  modified_base 8..8: /mod_base="OTHER" /note="2'-fluoro-nucleotide"
  modified_base 9..9: /mod_base="OTHER" /note="2'-OMe-nucleotide"
  modified_base 10..10: /mod_base="OTHER" /note="2'-fluoro-nucleotide"
  modified_base 11..11: /mod_base="OTHER" /note="2'-OMe-nucleotide"
  modified_base 12..12: /mod_base="OTHER" /note="2'-fluoro-nucleotide"
  modified_base 13..13: /mod_base="OTHER" /note="2'-OMe-nucleotide"
  modified_base 14..14: /mod_base="OTHER" /note="2'-fluoro-nucleotide"
  modified_base 15..15: /mod_base="OTHER" /note="2'-OMe-nucleotide"
  modified_base 16..16: /mod_base="OTHER" /note="2'-fluoro-nucleotide"
  modified_base 17..17: /mod_base="OTHER" /note="2'-OMe-nucleotide"
  modified_base 18..18: /mod_base="OTHER" /note="2'-fluoro-nucleotide"
  modified_base 19..19: /mod_base="OTHER" /note="2'-OMe-nucleotide"
  modified_base 20..20: /mod_base="OTHER" /note="2'-fluoro-nucleotide"
  modified_base 21..21: /mod_base="OTHER" /note="2'-OMe-nucleotide"
  modified_base 22..22: /mod_base="OTHER" /note="2'-fluoro-nucleotide"
  modified_base 23..23: /mod_base="OTHER" /note="Inverted nucleotide"
ccauaaaacaugauggcauucct

SEQ ID NO: 457 - DNA, 23 bp, Artificial Sequence
  Description of Artificial Sequence: Synthetic oligonucleotide
  Description of Combined DNA/RNA Molecule: Synthetic oligonucleotide
  N-term hydroxyl group
  C-term hydroxyl group
  modified_base 1..1: /mod_base="OTHER" /note="2'-OMe-nucleotide"
  modified_base 2..2: /mod_base="OTHER" /note="2'-OMe-nucleotide"
  modified_base 3..3: /mod_base="OTHER" /note="2'-OMe-nucleotide"
  modified_base 4..4: /mod_base="OTHER" /note="2'-fluoro-nucleotide"
  modified_base 5..5: /mod_base="OTHER" /note="2'-OMe-nucleotide"
  modified_base 6..6: /mod_base="OTHER" /note="2'-fluoro-nucleotide"
  modified_base 7..7: /mod_base="OTHER" /note="2'-OMe-nucleotide"
  modified_base 8..8: /mod_base="OTHER" /note="2'-fluoro-nucleotide"
  modified_base 9..9: /mod_base="OTHER" /note="2'-OMe-nucleotide"
  modified_base 10..10: /mod_base="OTHER" /note="2'-fluoro-nucleotide"
  modified_base 11..11: /mod_base="OTHER" /note="2'-OMe-nucleotide"
  modified_base 12..12: /mod_base="OTHER" /note="2'-fluoro-nucleotide"
  modified_base 13..13: /mod_base="OTHER" /note="2'-OMe-nucleotide"
  modified_base 14..14: /mod_base="OTHER" /note="2'-fluoro-nucleotide"
  modified_base 15..15: /mod_base="OTHER" /note="2'-OMe-nucleotide"
  modified_base 16..16: /mod_base="OTHER" /note="2'-fluoro-nucleotide"
  modified_base 17..17: /mod_base="OTHER" /note="2'-OMe-nucleotide"
  modified_base 18..18: /mod_base="OTHER" /note="2'-fluoro-nucleotide"
  modified_base 19..19: /mod_base="OTHER" /note="2'-OMe-nucleotide"
  modified_base 20..20: /mod_base="OTHER" /note="2'-fluoro-nucleotide"
  modified_base 21..21: /mod_base="OTHER" /note="2'-OMe-nucleotide"
  modified_base 22..22: /mod_base="OTHER" /note="2'-fluoro-nucleotide"
  modified_base 23..23: /mod_base="OTHER" /note="Inverted nucleotide"
ccauuuucaugucuacugugaut

SEQ ID NO: 458 - DNA, 23 bp, Artificial Sequence
  Description of Artificial Sequence: Synthetic oligonucleotide
  Description of Combined DNA/RNA Molecule: Synthetic oligonucleotide
  N-term hydroxyl group
  C-term hydroxyl group
  modified_base 1..1: /mod_base="OTHER" /note="2'-OMe-nucleotide"
  modified_base 2..2: /mod_base="OTHER" /note="2'-OMe-nucleotide"
  modified_base 3..3: /mod_base="OTHER" /note="2'-OMe-nucleotide"
  modified_base 4..4: /mod_base="OTHER" /note="2'-fluoro-nucleotide"
  modified_base 5..5: /mod_base="OTHER" /note="2'-OMe-nucleotide"
  modified_base 6..6: /mod_base="OTHER" /note="2'-fluoro-nucleotide"
  modified_base 7..7: /mod_base="OTHER" /note="2'-OMe-nucleotide"
  modified_base 8..8: /mod_base="OTHER" /note="2'-fluoro-nucleotide"
  modified_base 9..9: /mod_base="OTHER" /note="2'-OMe-nucleotide"
  modified_base 10..10: /mod_base="OTHER" /note="2'-fluoro-nucleotide"
  modified_base 11..11: /mod_base="OTHER" /note="2'-OMe-nucleotide"
  modified_base 12..12: /mod_base="OTHER" /note="2'-fluoro-nucleotide"
  modified_base 13..13: /mod_base="OTHER" /note="2'-OMe-nucleotide"
  modified_base 14..14: /mod_base="OTHER" /note="2'-fluoro-nucleotide"
  modified_base 15..15: /mod_base="OTHER" /note="2'-OMe-nucleotide"
  modified_base 16..16: /mod_base="OTHER" /note="2'-fluoro-nucleotide"
  modified_base 17..17: /mod_base="OTHER" /note="2'-OMe-nucleotide"
  modified_base 18..18: /mod_base="OTHER" /note="2'-fluoro-nucleotide"
  modified_base 19..19: /mod_base="OTHER" /note="2'-OMe-nucleotide"
  modified_base 20..20: /mod_base="OTHER" /note="2'-fluoro-nucleotide"
  modified_base 21..21: /mod_base="OTHER" /note="2'-OMe-nucleotide"
  modified_base 22..22: /mod_base="OTHER" /note="2'-fluoro-nucleotide"
  modified_base 23..23: /mod_base="OTHER" /note="Inverted nucleotide"
ccauuucaugucuacugugaugt

SEQ ID NO: 459 - DNA, 23 bp, Artificial Sequence
  Description of Artificial Sequence: Synthetic oligonucleotide
  Description of Combined DNA/RNA Molecule: Synthetic oligonucleotide
  N-term hydroxyl group
  C-term hydroxyl group
  modified_base 1..1: /mod_base="OTHER" /note="2'-OMe-nucleotide"
  modified_base 2..2: /mod_base="OTHER" /note="2'-OMe-nucleotide"
  modified_base 3..3: /mod_base="OTHER" /note="2'-OMe-nucleotide"
  modified_base 4..4: /mod_base="OTHER" /note="2'-fluoro-nucleotide"
  modified_base 5..5: /mod_base="OTHER" /note="2'-OMe-nucleotide"
  modified_base 6..6: /mod_base="OTHER" /note="2'-fluoro-nucleotide"
  modified_base 7..7: /mod_base="OTHER" /note="2'-OMe-nucleotide"
  modified_base 8..8: /mod_base="OTHER" /note="2'-fluoro-nucleotide"
  modified_base 9..9: /mod_base="OTHER" /note="2'-OMe-nucleotide"
  modified_base 10..10: /mod_base="OTHER" /note="2'-fluoro-nucleotide"
  modified_base 11..11: /mod_base="OTHER" /note="2'-OMe-nucleotide"
  modified_base 12..12: /mod_base="OTHER" /note="2'-fluoro-nucleotide"
  modified_base 13..13: /mod_base="OTHER" /note="2'-OMe-nucleotide"
  modified_base 14..14: /mod_base="OTHER" /note="2'-fluoro-nucleotide"
  modified_base 15..15: /mod_base="OTHER" /note="2'-OMe-nucleotide"
  modified_base 16..16: /mod_base="OTHER" /note="2'-fluoro-nucleotide"
  modified_base 17..17: /mod_base="OTHER" /note="2'-OMe-nucleotide"
  modified_base 18..18: /mod_base="OTHER" /note="2'-fluoro-nucleotide"
  modified_base 19..19: /mod_base="OTHER" /note="2'-OMe-nucleotide"
  modified_base 20..20: /mod_base="OTHER" /note="2'-fluoro-nucleotide"
  modified_base 21..21: /mod_base="OTHER" /note="2'-OMe-nucleotide"
  modified_base 22..22: /mod_base="OTHER" /note="2'-fluoro-nucleotide"
  modified_base 23..23: /mod_base="OTHER" /note="Inverted nucleotide"
ccaucaugucuacugugauguut

SEQ ID NO: 460 - DNA, 23 bp, Artificial Sequence
  Description of Artificial Sequence: Synthetic oligonucleotide
  Description of Combined DNA/RNA Molecule: Synthetic oligonucleotide
  N-term hydroxyl group
  C-term hydroxyl group
  modified_base 1..1: /mod_base="OTHER" /note="2'-OMe-nucleotide"
  modified_base 2..2: /mod_base="OTHER" /note="2'-OMe-nucleotide"
  modified_base 3..3: /mod_base="OTHER" /note="2'-OMe-nucleotide"
  modified_base 4..4: /mod_base="OTHER" /note="2'-fluoro-nucleotide"
  modified_base 5..5: /mod_base="OTHER" /note="2'-OMe-nucleotide"
  modified_base 6..6: /mod_base="OTHER" /note="2'-fluoro-nucleotide"
  modified_base 7..7: /mod_base="OTHER" /note="2'-OMe-nucleotide"
  modified_base 8..8: /mod_base="OTHER" /note="2'-fluoro-nucleotide"
  modified_base 9..9: /mod_base="OTHER" /note="2'-OMe-nucleotide"
  modified_base 10..10: /mod_base="OTHER" /note="2'-fluoro-nucleotide"
  modified_base 11..11: /mod_base="OTHER" /note="2'-OMe-nucleotide"
  modified_base 12..12: /mod_base="OTHER" /note="2'-fluoro-nucleotide"
  modified_base 13..13: /mod_base="OTHER" /note="2'-OMe-nucleotide"
  modified_base 14..14: /mod_base="OTHER" /note="2'-fluoro-nucleotide"
  modified_base 15..15: /mod_base="OTHER" /note="2'-OMe-nucleotide"
  modified_base 16..16: /mod_base="OTHER" /note="2'-fluoro-nucleotide"
  modified_base 17..17: /mod_base="OTHER" /note="2'-OMe-nucleotide"
  modified_base 18..18: /mod_base="OTHER" /note="2'-fluoro-nucleotide"
  modified_base 19..19: /mod_base="OTHER" /note="2'-OMe-nucleotide"
  modified_base 20..20: /mod_base="OTHER" /note="2'-fluoro-nucleotide"
  modified_base 21..21: /mod_base="OTHER" /note="2'-OMe-nucleotide"
  modified_base 22..22: /mod_base="OTHER" /note="2'-fluoro-nucleotide"
  modified_base 23..23: /mod_base="OTHER" /note="Inverted nucleotide"
ccaguuuuacgaauugaguuggt

SEQ ID NO: 461 - DNA, 23 bp, Artificial Sequence
  Description of Artificial Sequence: Synthetic oligonucleotide
  Description of Combined DNA/RNA Molecule: Synthetic oligonucleotide
  N-term hydroxyl group
  C-term hydroxyl group
  modified_base 1..1: /mod_base="OTHER" /note="2'-OMe-nucleotide"
  modified_base 2..2: /mod_base="OTHER" /note="2'-OMe-nucleotide"
  modified_base 3..3: /mod_base="OTHER" /note="2'-OMe-nucleotide"
  modified_base 4..4: /mod_base="OTHER" /note="2'-fluoro-nucleotide"
  modified_base 5..5: /mod_base="OTHER" /note="2'-OMe-nucleotide"
  modified_base 6..6: /mod_base="OTHER" /note="2'-fluoro-nucleotide"
  modified_base 7..7: /mod_base="OTHER" /note="2'-OMe-nucleotide"
  modified_base 8..8: /mod_base="OTHER" /note="2'-fluoro-nucleotide"
  modified_base 9..9: /mod_base="OTHER" /note="2'-OMe-nucleotide"
  modified_base 10..10: /mod_base="OTHER" /note="2'-fluoro-nucleotide"
  modified_base 11..11: /mod_base="OTHER" /note="2'-OMe-nucleotide"
  modified_base 12..12: /mod_base="OTHER" /note="2'-fluoro-nucleotide"
  modified_base 13..13: /mod_base="OTHER" /note="2'-OMe-nucleotide"
  modified_base 14..14: /mod_base="OTHER" /note="2'-fluoro-nucleotide"
  modified_base 15..15: /mod_base="OTHER" /note="2'-OMe-nucleotide"
  modified_base 16..16: /mod_base="OTHER" /note="2'-fluoro-nucleotide"
  modified_base 17..17: /mod_base="OTHER" /note="2'-OMe-nucleotide"
  modified_base 18..18: /mod_base="OTHER" /note="2'-fluoro-nucleotide"
  modified_base 19..19: /mod_base="OTHER" /note="2'-OMe-nucleotide"
  modified_base 20..20: /mod_base="OTHER" /note="2'-fluoro-nucleotide"
  modified_base 21..21: /mod_base="OTHER" /note="2'-OMe-nucleotide"
  modified_base 22..22: /mod_base="OTHER" /note="2'-fluoro-nucleotide"
  modified_base 23..23: /mod_base="OTHER" /note="Inverted nucleotide"
ccauuuuacgaauugaguuggat

SEQ ID NO: 462 - DNA, 23 bp, Artificial Sequence
  Description of Artificial Sequence: Synthetic oligonucleotide
  Description of Combined DNA/RNA Molecule: Synthetic oligonucleotide
  N-term hydroxyl group
  C-term hydroxyl group
  modified_base 1..1: /mod_base="OTHER" /note="2'-OMe-nucleotide"
  modified_base 2..2: /mod_base="OTHER" /note="2'-OMe-nucleotide"
  modified_base 3..3: /mod_base="OTHER" /note="2'-OMe-nucleotide"
  modified_base 4..4: /mod_base="OTHER" /note="2'-fluoro-nucleotide"
  modified_base 5..5: /mod_base="OTHER" /note="2'-OMe-nucleotide"
  modified_base 6..6: /mod_base="OTHER" /note="2'-fluoro-nucleotide"
  modified_base 7..7: /mod_base="OTHER" /note="2'-OMe-nucleotide"
  modified_base 8..8: /mod_base="OTHER" /note="2'-fluoro-nucleotide"
  modified_base 9..9: /mod_base="OTHER" /note="2'-OMe-nucleotide"
  modified_base 10..10: /mod_base="OTHER" /note="2'-fluoro-nucleotide"
  modified_base 11..11: /mod_base="OTHER" /note="2'-OMe-nucleotide"
  modified_base 12..12: /mod_base="OTHER" /note="2'-fluoro-nucleotide"
  modified_base 13..13: /mod_base="OTHER" /note="2'-OMe-nucleotide"
  modified_base 14..14: /mod_base="OTHER" /note="2'-fluoro-nucleotide"
  modified_base 15..15: /mod_base="OTHER" /note="2'-OMe-nucleotide"
  modified_base 16..16: /mod_base="OTHER" /note="2'-fluoro-nucleotide"
  modified_base 17..17: /mod_base="OTHER" /note="2'-OMe-nucleotide"
  modified_base 18..18: /mod_base="OTHER" /note="2'-fluoro-nucleotide"
  modified_base 19..19: /mod_base="OTHER" /note="2'-OMe-nucleotide"
  modified_base 20..20: /mod_base="OTHER" /note="2'-fluoro-nucleotide"
  modified_base 21..21: /mod_base="OTHER" /note="2'-OMe-nucleotide"
  modified_base 22..22: /mod_base="OTHER" /note="2'-fluoro-nucleotide"
  modified_base 23..23: /mod_base="OTHER" /note="Inverted nucleotide"
ccacgaaaccaacuauacgcuat

SEQ ID NO: 463 - DNA, 23 bp, Artificial Sequence
  Description of Artificial Sequence: Synthetic oligonucleotide
  Description of Combined DNA/RNA Molecule: Synthetic oligonucleotide
  N-term hydroxyl group
  C-term hydroxyl group
  modified_base 1..1: /mod_base="OTHER" /note="2'-OMe-nucleotide"
  modified_base 2..2: /mod_base="OTHER" /note="2'-OMe-nucleotide"
  modified_base 3..3: /mod_base="OTHER" /note="2'-OMe-nucleotide"
  modified_base 4..4: /mod_base="OTHER" /note="2'-fluoro-nucleotide"
  modified_base 5..5: /mod_base="OTHER" /note="2'-OMe-nucleotide"
  modified_base 6..6: /mod_base="OTHER" /note="2'-fluoro-nucleotide"
  modified_base 7..7: /mod_base="OTHER" /note="2'-OMe-nucleotide"
  modified_base 8..8: /mod_base="OTHER" /note="2'-fluoro-nucleotide"
  modified_base 9..9: /mod_base="OTHER" /note="2'-OMe-nucleotide"
  modified_base 10..10: /mod_base="OTHER" /note="2'-fluoro-nucleotide"
  modified_base 11..11: /mod_base="OTHER" /note="2'-OMe-nucleotide"
  modified_base 12..12: /mod_base="OTHER" /note="2'-fluoro-nucleotide"
  modified_base 13..13: /mod_base="OTHER" /note="2'-OMe-nucleotide"
  modified_base 14..14: /mod_base="OTHER" /note="2'-fluoro-nucleotide"
  modified_base 15..15: /mod_base="OTHER" /note="2'-OMe-nucleotide"
  modified_base 16..16: /mod_base="OTHER" /note="2'-fluoro-nucleotide"
  modified_base 17..17: /mod_base="OTHER" /note="2'-OMe-nucleotide"
  modified_base 18..18: /mod_base="OTHER" /note="2'-fluoro-nucleotide"
  modified_base 19..19: /mod_base="OTHER" /note="2'-OMe-nucleotide"
  modified_base 20..20: /mod_base="OTHER" /note="2'-fluoro-nucleotide"
  modified_base 21..21: /mod_base="OTHER" /note="2'-OMe-nucleotide"
  modified_base 22..22: /mod_base="OTHER" /note="2'-fluoro-nucleotide"
  modified_base 23..23: /mod_base="OTHER" /note="Inverted nucleotide"
ccagaaaccaacuauacgcuact

SEQ ID NO: 464 - DNA, 23 bp, Artificial Sequence
  Description of Artificial Sequence: Synthetic oligonucleotide
  Description of Combined DNA/RNA Molecule: Synthetic oligonucleotide
  N-term hydroxyl group
  C-term hydroxyl group
  modified_base 1..1: /mod_base="OTHER" /note="2'-OMe-nucleotide"
  modified_base 2..2: /mod_base="OTHER" /note="2'-OMe-nucleotide"
  modified_base 3..3: /mod_base="OTHER" /note="2'-OMe-nucleotide"
  modified_base 4..4: /mod_base="OTHER" /note="2'-fluoro-nucleotide"
  modified_base 5..5: /mod_base="OTHER" /note="2'-OMe-nucleotide"
  modified_base 6..6: /mod_base="OTHER" /note="2'-fluoro-nucleotide"
  modified_base 7..7: /mod_base="OTHER" /note="2'-OMe-nucleotide"
  modified_base 8..8: /mod_base="OTHER" /note="2'-fluoro-nucleotide"
  modified_base 9..9: /mod_base="OTHER" /note="2'-OMe-nucleotide"
  modified_base 10..10: /mod_base="OTHER" /note="2'-fluoro-nucleotide"
  modified_base 11..11: /mod_base="OTHER" /note="2'-OMe-nucleotide"
  modified_base 12..12: /mod_base="OTHER" /note="2'-fluoro-nucleotide"
  modified_base 13..13: /mod_base="OTHER" /note="2'-OMe-nucleotide"
  modified_base 14..14: /mod_base="OTHER" /note="2'-fluoro-nucleotide"
  modified_base 15..15: /mod_base="OTHER" /note="2'-OMe-nucleotide"
  modified_base 16..16: /mod_base="OTHER" /note="2'-fluoro-nucleotide"
  modified_base 17..17: /mod_base="OTHER" /note="2'-OMe-nucleotide"
  modified_base 18..18: /mod_base="OTHER" /note="2'-fluoro-nucleotide"
  modified_base 19..19: /mod_base="OTHER" /note="2'-OMe-nucleotide"
  modified_base 20..20: /mod_base="OTHER" /note="2'-fluoro-nucleotide"
  modified_base 21..21: /mod_base="OTHER" /note="2'-OMe-nucleotide"
  modified_base 22..22: /mod_base="OTHER" /note="2'-fluoro-nucleotide"
  modified_base 23..23: /mod_base="OTHER" /note="Inverted nucleotide"
ccaaaaccaacuauacgcuacat

SEQ ID NO: 465 - DNA, 23 bp, Artificial Sequence
  Description of Artificial Sequence: Synthetic oligonucleotide
  Description of Combined DNA/RNA Molecule: Synthetic oligonucleotide
  N-term hydroxyl group
  C-term hydroxyl group
  modified_base 1..1: /mod_base="OTHER" /note="2'-OMe-nucleotide"
  modified_base 2..2: /mod_base="OTHER" /note="2'-OMe-nucleotide"
  modified_base 3..3: /mod_base="OTHER" /note="2'-OMe-nucleotide"
  modified_base 4..4: /mod_base="OTHER" /note="2'-fluoro-nucleotide"
  modified_base 5..5: /mod_base="OTHER" /note="2'-OMe-nucleotide"
  modified_base 6..6: /mod_base="OTHER" /note="2'-fluoro-nucleotide"
  modified_base 7..7: /mod_base="OTHER" /note="2'-OMe-nucleotide"
  modified_base 8..8: /mod_base="OTHER" /note="2'-fluoro-nucleotide"
  modified_base 9..9: /mod_base="OTHER" /note="2'-OMe-nucleotide"
  modified_base 10..10: /mod_base="OTHER" /note="2'-fluoro-nucleotide"
  modified_base 11..11: /mod_base="OTHER" /note="2'-OMe-nucleotide"
  modified_base 12..12: /mod_base="OTHER" /note="2'-fluoro-nucleotide"
  modified_base 13..13: /mod_base="OTHER" /note="2'-OMe-nucleotide"
  modified_base 14..14: /mod_base="OTHER" /note="2'-fluoro-nucleotide"
  modified_base 15..15: /mod_base="OTHER" /note="2'-OMe-nucleotide"
  modified_base 16..16: /mod_base="OTHER" /note="2'-fluoro-nucleotide"
  modified_base 17..17: /mod_base="OTHER" /note="2'-OMe-nucleotide"
  modified_base 18..18: /mod_base="OTHER" /note="2'-fluoro-nucleotide"
  modified_base 19..19: /mod_base="OTHER" /note="2'-OMe-nucleotide"
  modified_base 20..20: /mod_base="OTHER" /note="2'-fluoro-nucleotide"
  modified_base 21..21: /mod_base="OTHER" /note="2'-OMe-nucleotide"
  modified_base 22..22: /mod_base="OTHER" /note="2'-fluoro-nucleotide"
  modified_base 23..23: /mod_base="OTHER" /note="Inverted nucleotide"
ccaaaccaacuauacgcuacaut

SEQ ID NO: 466 - DNA, 23 bp, Artificial Sequence
  Description of Artificial Sequence: Synthetic oligonucleotide
  Description of Combined DNA/RNA Molecule: Synthetic oligonucleotide
  N-term hydroxyl group
  C-term hydroxyl group
  modified_base 1..1: /mod_base="OTHER" /note="2'-OMe-nucleotide"
  modified_base 2..2: /mod_base="OTHER" /note="2'-OMe-nucleotide"
  modified_base 3..3: /mod_base="OTHER" /note="2'-OMe-nucleotide"
  modified_base 4..4: /mod_base="OTHER" /note="2'-fluoro-nucleotide"
  modified_base 5..5: /mod_base="OTHER" /note="2'-OMe-nucleotide"
  modified_base 6..6: /mod_base="OTHER" /note="2'-fluoro-nucleotide"
  modified_base 7..7: /mod_base="OTHER" /note="2'-OMe-nucleotide"
  modified_base 8..8: /mod_base="OTHER" /note="2'-fluoro-nucleotide"
  modified_base 9..9: /mod_base="OTHER" /note="2'-OMe-nucleotide"
  modified_base 10..10: /mod_base="OTHER" /note="2'-fluoro-nucleotide"
  modified_base 11..11: /mod_base="OTHER" /note="2'-OMe-nucleotide"
  modified_base 12..12: /mod_base="OTHER" /note="2'-fluoro-nucleotide"
  modified_base 13..13: /mod_base="OTHER" /note="2'-OMe-nucleotide"
  modified_base 14..14: /mod_base="OTHER" /note="2'-fluoro-nucleotide"
  modified_base 15..15: /mod_base="OTHER" /note="2'-OMe-nucleotide"
  modified_base 16..16: /mod_base="OTHER" /note="2'-fluoro-nucleotide"
  modified_base 17..17: /mod_base="OTHER" /note="2'-OMe-nucleotide"
  modified_base 18..18: /mod_base="OTHER" /note="2'-fluoro-nucleotide"
  modified_base 19..19: /mod_base="OTHER" /note="2'-OMe-nucleotide"
  modified_base 20..20: /mod_base="OTHER" /note="2'-fluoro-nucleotide"
  modified_base 21..21: /mod_base="OTHER" /note="2'-OMe-nucleotide"
  modified_base 22..22: /mod_base="OTHER" /note="2'-fluoro-nucleotide"
  modified_base 23..23: /mod_base="OTHER" /note="Inverted nucleotide"
ccaucacaaagcaaaaggacact

SEQ ID NO: 467 - DNA, 23 bp, Artificial Sequence
  Description of Artificial Sequence: Synthetic oligonucleotide
  Description of Combined DNA/RNA Molecule: Synthetic oligonucleotide
  N-term hydroxyl group
  C-term hydroxyl group
  modified_base 1..1: /mod_base="OTHER" /note="2'-OMe-nucleotide"
  modified_base 2..2: /mod_base="OTHER" /note="2'-OMe-nucleotide"
  modified_base 3..3: /mod_base="OTHER" /note="2'-OMe-nucleotide"
  modified_base 4..4: /mod_base="OTHER" /note="2'-fluoro-nucleotide"
  modified_base 5..5: /mod_base="OTHER" /note="2'-OMe-nucleotide"
  modified_base 6..6: /mod_base="OTHER" /note="2'-fluoro-nucleotide"
  modified_base 7..7: /mod_base="OTHER" /note="2'-OMe-nucleotide"
  modified_base 8..8: /mod_base="OTHER" /note="2'-fluoro-nucleotide"
  modified_base 9..9: /mod_base="OTHER" /note="2'-OMe-nucleotide"
  modified_base 10..10: /mod_base="OTHER" /note="2'-fluoro-nucleotide"
  modified_base 11..11: /mod_base="OTHER" /note="2'-OMe-nucleotide"
  modified_base 12..12: /mod_base="OTHER" /note="2'-fluoro-nucleotide"
  modified_base 13..13: /mod_base="OTHER" /note="2'-OMe-nucleotide"
  modified_base 14..14: /mod_base="OTHER" /note="2'-fluoro-nucleotide"
  modified_base 15..15: /mod_base="OTHER" /note="2'-OMe-nucleotide"
  modified_base 16..16: /mod_base="OTHER" /note="2'-fluoro-nucleotide"
  modified_base 17..17: /mod_base="OTHER" /note="2'-OMe-nucleotide"
  modified_base 18..18: /mod_base="OTHER" /note="2'-fluoro-nucleotide"
  modified_base 19..19: /mod_base="OTHER" /note="2'-OMe-nucleotide"
  modified_base 20..20: /mod_base="OTHER" /note="2'-fluoro-nucleotide"
  modified_base 21..21: /mod_base="OTHER" /note="2'-OMe-nucleotide"
  modified_base 22..22: /mod_base="OTHER" /note="2'-fluoro-nucleotide"
  modified_base 23..23: /mod_base="OTHER" /note="Inverted nucleotide"
ccaguuauucaggaggcuggugt

SEQ ID NO: 468 - DNA, 23 bp, Artificial Sequence
  Description of Artificial Sequence: Synthetic oligonucleotide
  Description of Combined DNA/RNA Molecule: Synthetic oligonucleotide
  N-term hydroxyl group
  C-term hydroxyl group
  modified_base 1..1: /mod_base="OTHER" /note="2'-OMe-nucleotide"
  modified_base 2..2: /mod_base="OTHER" /note="2'-OMe-nucleotide"
  modified_base 3..3: /mod_base="OTHER" /note="2'-OMe-nucleotide"
  modified_base 4..4: /mod_base="OTHER" /note="2'-fluoro-nucleotide"
  modified_base 5..5: /mod_base="OTHER" /note="2'-OMe-nucleotide"
  modified_base 6..6: /mod_base="OTHER" /note="2'-fluoro-nucleotide"
  modified_base 7..7: /mod_base="OTHER" /note="2'-OMe-nucleotide"
  modified_base 8..8: /mod_base="OTHER" /note="2'-fluoro-nucleotide"
  modified_base 9..9: /mod_base="OTHER" /note="2'-OMe-nucleotide"
  modified_base 10..10: /mod_base="OTHER" /note="2'-fluoro-nucleotide"
  modified_base 11..11: /mod_base="OTHER" /note="2'-OMe-nucleotide"
  modified_base 12..12: /mod_base="OTHER" /note="2'-fluoro-nucleotide"
  modified_base 13..13: /mod_base="OTHER" /note="2'-OMe-nucleotide"
  modified_base 14..14: /mod_base="OTHER" /note="2'-fluoro-nucleotide"
  modified_base 15..15: /mod_base="OTHER" /note="2'-OMe-nucleotide"
  modified_base 16..16: /mod_base="OTHER" /note="2'-fluoro-nucleotide"
  modified_base 17..17: /mod_base="OTHER" /note="2'-OMe-nucleotide"
  modified_base 18..18: /mod_base="OTHER" /note="2'-fluoro-nucleotide"
  modified_base 19..19: /mod_base="OTHER" /note="2'-OMe-nucleotide"
  modified_base 20..20: /mod_base="OTHER" /note="2'-fluoro-nucleotide"
  modified_base 21..21: /mod_base="OTHER" /note="2'-OMe-nucleotide"
  modified_base 22..22: /mod_base="OTHER" /note="2'-fluoro-nucleotide"
  modified_base 23..23: /mod_base="OTHER" /note="Inverted nucleotide"
ccauuauucaggaggcugguggt

SEQ ID NO: 469 - DNA, 23 bp, Artificial Sequence
  Description of Artificial Sequence: Synthetic oligonucleotide
  Description of Combined DNA/RNA Molecule: Synthetic oligonucleotide
  N-term hydroxyl group
  C-term hydroxyl group
  modified_base 1..1: /mod_base="OTHER" /note="2'-OMe-nucleotide"
  modified_base 2..2: /mod_base="OTHER" /note="2'-OMe-nucleotide"
  modified_base 3..3: /mod_base="OTHER" /note="2'-OMe-nucleotide"
  modified_base 4..4: /mod_base="OTHER" /note="2'-fluoro-nucleotide"
  modified_base 5..5: /mod_base="OTHER" /note="2'-OMe-nucleotide"
  modified_base 6..6: /mod_base="OTHER" /note="2'-fluoro-nucleotide"
  modified_base 7..7: /mod_base="OTHER" /note="2'-OMe-nucleotide"
  modified_base 8..8: /mod_base="OTHER" /note="2'-fluoro-nucleotide"
  modified_base 9..9: /mod_base="OTHER" /note="2'-OMe-nucleotide"
  modified_base 10..10: /mod_base="OTHER" /note="2'-fluoro-nucleotide"
  modified_base 11..11: /mod_base="OTHER" /note="2'-OMe-nucleotide"
  modified_base 12..12: /mod_base="OTHER" /note="2'-fluoro-nucleotide"
  modified_base 13..13: /mod_base="OTHER" /note="2'-OMe-nucleotide"
  modified_base 14..14: /mod_base="OTHER" /note="2'-fluoro-nucleotide"
  modified_base 15..15: /mod_base="OTHER" /note="2'-OMe-nucleotide"
  modified_base 16..16: /mod_base="OTHER" /note="2'-fluoro-nucleotide"
  modified_base 17..17: /mod_base="OTHER" /note="2'-OMe-nucleotide"
  modified_base 18..18: /mod_base="OTHER" /note="2'-fluoro-nucleotide"
  modified_base 19..19: /mod_base="OTHER" /note="2'-OMe-nucleotide"
  modified_base 20..20: /mod_base="OTHER" /note="2'-fluoro-nucleotide"
  modified_base 21..21: /mod_base="OTHER" /note="2'-OMe-nucleotide"
  modified_base 22..22: /mod_base="OTHER" /note="2'-fluoro-nucleotide"
  modified_base 23..23: /mod_base="OTHER" /note="Inverted nucleotide"
ccauauucaggaggcugguggut

SEQ ID NO: 470 - DNA, 23 bp, Artificial Sequence
  Description of Artificial Sequence: Synthetic oligonucleotide
  Description of Combined DNA/RNA Molecule: Synthetic oligonucleotide
  N-term hydroxyl group
  C-term hydroxyl group
  modified_base 1..1: /mod_base="OTHER" /note="2'-OMe-nucleotide"
  modified_base 2..2: /mod_base="OTHER" /note="2'-OMe-nucleotide"
  modified_base 3..3: /mod_base="OTHER" /note="2'-OMe-nucleotide"
  modified_base 4..4: /mod_base="OTHER" /note="2'-fluoro-nucleotide"
  modified_base 5..5: /mod_base="OTHER" /note="2'-OMe-nucleotide"
  modified_base 6..6: /mod_base="OTHER" /note="2'-fluoro-nucleotide"
  modified_base 7..7: /mod_base="OTHER" /note="2'-OMe-nucleotide"
  modified_base 8..8: /mod_base="OTHER" /note="2'-fluoro-nucleotide"
  modified_base 9..9: /mod_base="OTHER" /note="2'-OMe-nucleotide"
  modified_base 10..10: /mod_base="OTHER" /note="2'-fluoro-nucleotide"
  modified_base 11..11: /mod_base="OTHER" /note="2'-OMe-nucleotide"
  modified_base 12..12: /mod_base="OTHER" /note="2'-fluoro-nucleotide"
  modified_base 13..13: /mod_base="OTHER" /note="2'-OMe-nucleotide"
  modified_base 14..14: /mod_base="OTHER" /note="2'-fluoro-nucleotide"
  modified_base 15..15: /mod_base="OTHER" /note="2'-OMe-nucleotide"
  modified_base 16..16: /mod_base="OTHER" /note="2'-fluoro-nucleotide"
  modified_base 17..17: /mod_base="OTHER" /note="2'-OMe-nucleotide"
  modified_base 18..18: /mod_base="OTHER" /note="2'-fluoro-nucleotide"
  modified_base 19..19: /mod_base="OTHER" /note="2'-OMe-nucleotide"
  modified_base 20..20: /mod_base="OTHER" /note="2'-fluoro-nucleotide"
  modified_base 21..21: /mod_base="OTHER" /note="2'-OMe-nucleotide"
  modified_base 22..22: /mod_base="OTHER" /note="2'-fluoro-nucleotide"
  modified_base 23..23: /mod_base="OTHER" /note="Inverted nucleotide"
ccacucauuccaaguuaaugugt

SEQ ID NO: 471 - DNA, 23 bp, Artificial Sequence
  Description of Artificial Sequence: Synthetic oligonucleotide
  Description of Combined DNA/RNA Molecule: Synthetic oligonucleotide
  N-term hydroxyl group
  C-term hydroxyl group
  modified_base 1..1: /mod_base="OTHER" /note="2'-OMe-nucleotide"
  modified_base 2..2: /mod_base="OTHER" /note="2'-OMe-nucleotide"
  modified_base 3..3: /mod_base="OTHER" /note="2'-OMe-nucleotide"
  modified_base 4..4: /mod_base="OTHER" /note="2'-fluoro-nucleotide"
  modified_base 5..5: /mod_base="OTHER" /note="2'-OMe-nucleotide"
  modified_base 6..6: /mod_base="OTHER" /note="2'-fluoro-nucleotide"
  modified_base 7..7: /mod_base="OTHER" /note="2'-OMe-nucleotide"
  modified_base 8..8: /mod_base="OTHER" /note="2'-fluoro-nucleotide"
  modified_base 9..9: /mod_base="OTHER" /note="2'-OMe-nucleotide"
  modified_base 10..10: /mod_base="OTHER" /note="2'-fluoro-nucleotide"
  modified_base 11..11: /mod_base="OTHER" /note="2'-OMe-nucleotide"
  modified_base 12..12: /mod_base="OTHER" /note="2'-fluoro-nucleotide"
  modified_base 13..13: /mod_base="OTHER" /note="2'-OMe-nucleotide"
  modified_base 14..14: /mod_base="OTHER" /note="2'-fluoro-nucleotide"
  modified_base 15..15: /mod_base="OTHER" /note="2'-OMe-nucleotide"
  modified_base 16..16: /mod_base="OTHER" /note="2'-fluoro-nucleotide"
  modified_base 17..17: /mod_base="OTHER" /note="2'-OMe-nucleotide"
  modified_base 18..18: /mod_base="OTHER" /note="2'-fluoro-nucleotide"
  modified_base 19..19: /mod_base="OTHER" /note="2'-OMe-nucleotide"
  modified_base 20..20: /mod_base="OTHER" /note="2'-fluoro-nucleotide"
  modified_base 21..21: /mod_base="OTHER" /note="2'-OMe-nucleotide"
  modified_base 22..22: /mod_base="OTHER" /note="2'-fluoro-nucleotide"
  modified_base 23..23: /mod_base="OTHER" /note="Inverted nucleotide"
ccaucauuccaaguuaauguggt

SEQ ID NO: 472 - DNA, 23 bp, Artificial Sequence
  Description of Artificial Sequence: Synthetic oligonucleotide
  Description of Combined DNA/RNA Molecule: Synthetic oligonucleotide
  N-term hydroxyl group
  C-term hydroxyl group
  modified_base 1..1: /mod_base="OTHER" /note="2'-OMe-nucleotide"
  modified_base 2..2: /mod_base="OTHER" /note="2'-OMe-nucleotide"
  modified_base 3..3: /mod_base="OTHER" /note="2'-OMe-nucleotide"
  modified_base 4..4: /mod_base="OTHER" /note="2'-fluoro-nucleotide"
  modified_base 5..5: /mod_base="OTHER" /note="2'-OMe-nucleotide"
  modified_base 6..6: /mod_base="OTHER" /note="2'-fluoro-nucleotide"
  modified_base 7..7: /mod_base="OTHER" /note="2'-OMe-nucleotide"
  modified_base 8..8: /mod_base="OTHER" /note="2'-fluoro-nucleotide"
  modified_base 9..9: /mod_base="OTHER" /note="2'-OMe-nucleotide"
  modified_base 10..10: /mod_base="OTHER" /note="2'-fluoro-nucleotide"
  modified_base 11..11: /mod_base="OTHER" /note="2'-OMe-nucleotide"
  modified_base 12..12: /mod_base="OTHER" /note="2'-fluoro-nucleotide"
  modified_base 13..13: /mod_base="OTHER" /note="2'-OMe-nucleotide"
  modified_base 14..14: /mod_base="OTHER" /note="2'-fluoro-nucleotide"
  modified_base 15..15: /mod_base="OTHER" /note="2'-OMe-nucleotide"
  modified_base 16..16: /mod_base="OTHER" /note="2'-fluoro-nucleotide"
  modified_base 17..17: /mod_base="OTHER" /note="2'-OMe-nucleotide"
  modified_base 18..18: /mod_base="OTHER" /note="2'-fluoro-nucleotide"
  modified_base 19..19: /mod_base="OTHER" /note="2'-OMe-nucleotide"
  modified_base 20..20: /mod_base="OTHER" /note="2'-fluoro-nucleotide"
  modified_base 21..21: /mod_base="OTHER" /note="2'-OMe-nucleotide"
  modified_base 22..22: /mod_base="OTHER" /note="2'-fluoro-nucleotide"
  modified_base 23..23: /mod_base="OTHER" /note="Inverted nucleotide"
ccacauuccaaguuaauguggut

SEQ ID NO: 473 - DNA, 23 bp, Artificial Sequence
  Description of Artificial Sequence: Synthetic oligonucleotide
  Description of Combined DNA/RNA Molecule: Synthetic oligonucleotide
  N-term hydroxyl group
  C-term hydroxyl group
  modified_base 1..1: /mod_base="OTHER" /note="2'-OMe-nucleotide"
  modified_base 2..2: /mod_base="OTHER" /note="2'-OMe-nucleotide"
  modified_base 3..3: /mod_base="OTHER" /note="2'-OMe-nucleotide"
  modified_base 4..4: /mod_base="OTHER" /note="2'-fluoro-nucleotide"
  modified_base 5..5: /mod_base="OTHER" /note="2'-OMe-nucleotide"
  modified_base 6..6: /mod_base="OTHER" /note="2'-fluoro-nucleotide"
  modified_base 7..7: /mod_base="OTHER" /note="2'-OMe-nucleotide"
  modified_base 8..8: /mod_base="OTHER" /note="2'-fluoro-nucleotide"
  modified_base 9..9: /mod_base="OTHER" /note="2'-OMe-nucleotide"
  modified_base 10..10: /mod_base="OTHER" /note="2'-fluoro-nucleotide"
  modified_base 11..11: /mod_base="OTHER" /note="2'-OMe-nucleotide"
  modified_base 12..12: /mod_base="OTHER" /note="2'-fluoro-nucleotide"
  modified_base 13..13: /mod_base="OTHER" /note="2'-OMe-nucleotide"
  modified_base 14..14: /mod_base="OTHER" /note="2'-fluoro-nucleotide"
  modified_base 15..15: /mod_base="OTHER" /note="2'-OMe-nucleotide"
  modified_base 16..16: /mod_base="OTHER" /note="2'-fluoro-nucleotide"
  modified_base 17..17: /mod_base="OTHER" /note="2'-OMe-nucleotide"
  modified_base 18..18: /mod_base="OTHER" /note="2'-fluoro-nucleotide"
  modified_base 19..19: /mod_base="OTHER" /note="2'-OMe-nucleotide"
  modified_base 20..20: /mod_base="OTHER" /note="2'-fluoro-nucleotide"
  modified_base 21..21: /mod_base="OTHER" /note="2'-OMe-nucleotide"
  modified_base 22..22: /mod_base="OTHER" /note="2'-fluoro-nucleotide"
  modified_base 23..23: /mod_base="OTHER" /note="Inverted nucleotide"
ccauaauaaucugguauuaaaut

SEQ ID NO: 474 - DNA, 23 bp, Artificial Sequence
  Description of Artificial Sequence: Synthetic oligonucleotide
  Description of Combined DNA/RNA Molecule: Synthetic oligonucleotide
  N-term hydroxyl group
  C-term hydroxyl group
  modified_base 1..1: /mod_base="OTHER" /note="2'-OMe-nucleotide"
  modified_base 2..2: /mod_base="OTHER" /note="2'-OMe-nucleotide"
  modified_base 3..3: /mod_base="OTHER" /note="2'-OMe-nucleotide"
  modified_base 4..4: /mod_base="OTHER" /note="2'-fluoro-nucleotide"
  modified_base 5..5: /mod_base="OTHER" /note="2'-OMe-nucleotide"
  modified_base 6..6: /mod_base="OTHER" /note="2'-fluoro-nucleotide"
  modified_base 7..7: /mod_base="OTHER" /note="2'-OMe-nucleotide"
  modified_base 8..8: /mod_base="OTHER" /note="2'-fluoro-nucleotide"
  modified_base 9..9: /mod_base="OTHER" /note="2'-OMe-nucleotide"
  modified_base 10..10: /mod_base="OTHER" /note="2'-fluoro-nucleotide"
  modified_base 11..11: /mod_base="OTHER" /note="2'-OMe-nucleotide"
  modified_base 12..12: /mod_base="OTHER" /note="2'-fluoro-nucleotide"
  modified_base 13..13: /mod_base="OTHER" /note="2'-OMe-nucleotide"
  modified_base 14..14: /mod_base="OTHER" /note="2'-fluoro-nucleotide"
  modified_base 15..15: /mod_base="OTHER" /note="2'-OMe-nucleotide"
  modified_base 16..16: /mod_base="OTHER" /note="2'-fluoro-nucleotide"
  modified_base 17..17: /mod_base="OTHER" /note="2'-OMe-nucleotide"
  modified_base 18..18: /mod_base="OTHER" /note="2'-fluoro-nucleotide"
  modified_base 19..19: /mod_base="OTHER" /note="2'-OMe-nucleotide"
  modified_base 20..20: /mod_base="OTHER" /note="2'-fluoro-nucleotide"
  modified_base 21..21: /mod_base="OTHER" /note="2'-OMe-nucleotide"
  modified_base 22..22: /mod_base="OTHER" /note="2'-fluoro-nucleotide"
  modified_base 23..23: /mod_base="OTHER" /note="Inverted nucleotide"
ccaaauaaucugguauuaaauct

SEQ ID NO: 475 - DNA, 23 bp, Artificial Sequence
  Description of Artificial Sequence: Synthetic oligonucleotide
  Description of Combined DNA/RNA Molecule: Synthetic oligonucleotide
  N-term hydroxyl group
  C-term hydroxyl group
  modified_base 1..1: /mod_base="OTHER" /note="2'-OMe-nucleotide"
  modified_base 2..2: /mod_base="OTHER" /note="2'-OMe-nucleotide"
  modified_base 3..3: /mod_base="OTHER" /note="2'-OMe-nucleotide"
  modified_base 4..4: /mod_base="OTHER" /note="2'-fluoro-nucleotide"
  modified_base 5..5: /mod_base="OTHER" /note="2'-OMe-nucleotide"
  modified_base 6..6: /mod_base="OTHER" /note="2'-fluoro-nucleotide"
  modified_base 7..7: /mod_base="OTHER" /note="2'-OMe-nucleotide"
  modified_base 8..8: /mod_base="OTHER" /note="2'-fluoro-nucleotide"
  modified_base 9..9: /mod_base="OTHER" /note="2'-OMe-nucleotide"
  modified_base 10..10: /mod_base="OTHER" /note="2'-fluoro-nucleotide"
  modified_base 11..11: /mod_base="OTHER" /note="2'-OMe-nucleotide"
  modified_base 12..12: /mod_base="OTHER" /note="2'-fluoro-nucleotide"
  modified_base 13..13: /mod_base="OTHER" /note="2'-OMe-nucleotide"
  modified_base 14..14: /mod_base="OTHER" /note="2'-fluoro-nucleotide"
  modified_base 15..15: /mod_base="OTHER" /note="2'-OMe-nucleotide"
  modified_base 16..16: /mod_base="OTHER" /note="2'-fluoro-nucleotide"
  modified_base 17..17: /mod_base="OTHER" /note="2'-OMe-nucleotide"
  modified_base 18..18: /mod_base="OTHER" /note="2'-fluoro-nucleotide"
  modified_base 19..19: /mod_base="OTHER" /note="2'-OMe-nucleotide"
  modified_base 20..20: /mod_base="OTHER" /note="2'-fluoro-nucleotide"
  modified_base 21..21: /mod_base="OTHER" /note="2'-OMe-nucleotide"
  modified_base 22..22: /mod_base="OTHER" /note="2'-fluoro-nucleotide"
  modified_base 23..23: /mod_base="OTHER" /note="Inverted nucleotide"
ccauaaucugguauuaaauccut

SEQ ID NO: 476 - DNA, 23 bp, Artificial Sequence
  Description of Artificial Sequence: Synthetic oligonucleotide
  Description of Combined DNA/RNA Molecule: Synthetic oligonucleotide
  N-term hydroxyl group
  C-term hydroxyl group
  modified_base 1..1: /mod_base="OTHER" /note="2'-OMe-nucleotide"
  modified_base 2..2: /mod_base="OTHER" /note="2'-OMe-nucleotide"
  modified_base 3..3: /mod_base="OTHER" /note="2'-OMe-nucleotide"
  modified_base 4..4: /mod_base="OTHER" /note="2'-fluoro-nucleotide"
  modified_base 5..5: /mod_base="OTHER" /note="2'-OMe-nucleotide"
  modified_base 6..6: /mod_base="OTHER" /note="2'-fluoro-nucleotide"
  modified_base 7..7: /mod_base="OTHER" /note="2'-OMe-nucleotide"
  modified_base 8..8: /mod_base="OTHER" /note="2'-fluoro-nucleotide"
  modified_base 9..9: /mod_base="OTHER" /note="2'-OMe-nucleotide"
  modified_base 10..10: /mod_base="OTHER" /note="2'-fluoro-nucleotide"
  modified_base 11..11: /mod_base="OTHER" /note="2'-OMe-nucleotide"
  modified_base 12..12: /mod_base="OTHER" /note="2'-fluoro-nucleotide"
  modified_base 13..13: /mod_base="OTHER" /note="2'-OMe-nucleotide"
  modified_base 14..14: /mod_base="OTHER" /note="2'-fluoro-nucleotide"
  modified_base 15..15: /mod_base="OTHER" /note="2'-OMe-nucleotide"
  modified_base 16..16: /mod_base="OTHER" /note="2'-fluoro-nucleotide"
  modified_base 17..17: /mod_base="OTHER" /note="2'-OMe-nucleotide"
  modified_base 18..18: /mod_base="OTHER" /note="2'-fluoro-nucleotide"
  modified_base 19..19: /mod_base="OTHER" /note="2'-OMe-nucleotide"
  modified_base 20..20: /mod_base="OTHER" /note="2'-fluoro-nucleotide"
  modified_base 21..21: /mod_base="OTHER" /note="2'-OMe-nucleotide"
  modified_base 22..22: /mod_base="OTHER" /note="2'-fluoro-nucleotide"
  modified_base 23..23: /mod_base="OTHER" /note="Inverted nucleotide"
ccaaucugguauuaaauccuuat

SEQ ID NO: 477 - DNA, 23 bp, Artificial Sequence
  Description of Artificial Sequence: Synthetic oligonucleotide
  Description of Combined DNA/RNA Molecule: Synthetic oligonucleotide
  N-term hydroxyl group
  C-term hydroxyl group
  modified_base 1..1: /mod_base="OTHER" /note="2'-OMe-nucleotide"
  modified_base 2..2: /mod_base="OTHER" /note="2'-OMe-nucleotide"
  modified_base 3..3: /mod_base="OTHER" /note="2'-OMe-nucleotide"
  modified_base 4..4: /mod_base="OTHER" /note="2'-fluoro-nucleotide"
  modified_base 5..5: /mod_base="OTHER" /note="2'-OMe-nucleotide"
  modified_base 6..6: /mod_base="OTHER" /note="2'-fluoro-nucleotide"
  modified_base 7..7: /mod_base="OTHER" /note="2'-OMe-nucleotide"
  modified_base 8..8: /mod_base="OTHER" /note="2'-fluoro-nucleotide"
  modified_base 9..9: /mod_base="OTHER" /note="2'-OMe-nucleotide"
  modified_base 10..10: /mod_base="OTHER" /note="2'-fluoro-nucleotide"
  modified_base 11..11: /mod_base="OTHER" /note="2'-OMe-nucleotide"
  modified_base 12..12: /mod_base="OTHER" /note="2'-fluoro-nucleotide"
  modified_base 13..13: /mod_base="OTHER" /note="2'-OMe-nucleotide"
  modified_base 14..14: /mod_base="OTHER" /note="2'-fluoro-nucleotide"
  modified_base 15..15: /mod_base="OTHER" /note="2'-OMe-nucleotide"
  modified_base 16..16: /mod_base="OTHER" /note="2'-fluoro-nucleotide"
  modified_base 17..17: /mod_base="OTHER" /note="2'-OMe-nucleotide"
  modified_base 18..18: /mod_base="OTHER" /note="2'-fluoro-nucleotide"
  modified_base 19..19: /mod_base="OTHER" /note="2'-OMe-nucleotide"
  modified_base 20..20: /mod_base="OTHER" /note="2'-fluoro-nucleotide"
  modified_base 21..21: /mod_base="OTHER" /note="2'-OMe-nucleotide"
  modified_base 22..22: /mod_base="OTHER" /note="2'-fluoro-nucleotide"
  modified_base 23..23: /mod_base="OTHER" /note="Inverted nucleotide"
ccacugguauuaaauccuuaagt

SEQ ID NO: 478 - DNA, 23 bp, Artificial Sequence
  Description of Artificial Sequence: Synthetic oligonucleotide
  Description of Combined DNA/RNA Molecule: Synthetic oligonucleotide
  N-term hydroxyl group
  C-term hydroxyl group
  modified_base 1..1: /mod_base="OTHER" /note="2'-OMe-nucleotide"
  modified_base 2..2: /mod_base="OTHER" /note="2'-OMe-nucleotide"
  modified_base 3..3: /mod_base="OTHER" /note="2'-OMe-nucleotide"
  modified_base 4..4: /mod_base="OTHER" /note="2'-fluoro-nucleotide"
  modified_base 5..5: /mod_base="OTHER" /note="2'-OMe-nucleotide"
  modified_base 6..6: /mod_base="OTHER" /note="2'-fluoro-nucleotide"
  modified_base 7..7: /mod_base="OTHER" /note="2'-OMe-nucleotide"
  modified_base 8..8: /mod_base="OTHER" /note="2'-fluoro-nucleotide"
  modified_base 9..9: /mod_base="OTHER" /note="2'-OMe-nucleotide"
  modified_base 10..10: /mod_base="OTHER" /note="2'-fluoro-nucleotide"
  modified_base 11..11: /mod_base="OTHER" /note="2'-OMe-nucleotide"
  modified_base 12..12: /mod_base="OTHER" /note="2'-fluoro-nucleotide"
  modified_base 13..13: /mod_base="OTHER" /note="2'-OMe-nucleotide"
  modified_base 14..14: /mod_base="OTHER" /note="2'-fluoro-nucleotide"
  modified_base 15..15: /mod_base="OTHER" /note="2'-OMe-nucleotide"
  modified_base 16..16: /mod_base="OTHER" /note="2'-fluoro-nucleotide"
  modified_base 17..17: /mod_base="OTHER" /note="2'-OMe-nucleotide"
  modified_base 18..18: /mod_base="OTHER" /note="2'-fluoro-nucleotide"
  modified_base 19..19: /mod_base="OTHER" /note="2'-OMe-nucleotide"
  modified_base 20..20: /mod_base="OTHER" /note="2'-fluoro-nucleotide"
  modified_base 21..21: /mod_base="OTHER" /note="2'-OMe-nucleotide"
  modified_base 22..22: /mod_base="OTHER" /note="2'-fluoro-nucleotide"
  modified_base 23..23: /mod_base="OTHER" /note="Inverted nucleotide"
ccaugguauuaaauccuuaagat

SEQ ID NO: 479 - DNA, 23 bp, Artificial Sequence
  Description of Artificial Sequence: Synthetic oligonucleotide
  Description of Combined DNA/RNA Molecule: Synthetic oligonucleotide
  N-term hydroxyl group
  C-term hydroxyl group
  modified_base 1..1: /mod_base="OTHER" /note="2'-OMe-nucleotide"
  modified_base 2..2: /mod_base="OTHER" /note="2'-OMe-nucleotide"
  modified_base 3..3: /mod_base="OTHER" /note="2'-OMe-nucleotide"
  modified_base 4..4: /mod_base="OTHER" /note="2'-fluoro-nucleotide"
  modified_base 5..5: /mod_base="OTHER" /note="2'-OMe-nucleotide"
  modified_base 6..6: /mod_base="OTHER" /note="2'-fluoro-nucleotide"
  modified_base 7..7: /mod_base="OTHER" /note="2'-OMe-nucleotide"
  modified_base 8..8: /mod_base="OTHER" /note="2'-fluoro-nucleotide"
  modified_base 9..9: /mod_base="OTHER" /note="2'-OMe-nucleotide"
  modified_base 10..10: /mod_base="OTHER" /note="2'-fluoro-nucleotide"
  modified_base 11..11: /mod_base="OTHER" /note="2'-OMe-nucleotide"
  modified_base 12..12: /mod_base="OTHER" /note="2'-fluoro-nucleotide"
  modified_base 13..13: /mod_base="OTHER" /note="2'-OMe-nucleotide"
  modified_base 14..14: /mod_base="OTHER" /note="2'-fluoro-nucleotide"
  modified_base 15..15: /mod_base="OTHER" /note="2'-OMe-nucleotide"
  modified_base 16..16: /mod_base="OTHER" /note="2'-fluoro-nucleotide"
  modified_base 17..17: /mod_base="OTHER" /note="2'-OMe-nucleotide"
  modified_base 18..18: /mod_base="OTHER" /note="2'-fluoro-nucleotide"
  modified_base 19..19: /mod_base="OTHER" /note="2'-OMe-nucleotide"
  modified_base 20..20: /mod_base="OTHER" /note="2'-fluoro-nucleotide"
  modified_base 21..21: /mod_base="OTHER" /note="2'-OMe-nucleotide"
  modified_base 22..22: /mod_base="OTHER" /note="2'-fluoro-nucleotide"
  modified_base 23..23: /mod_base="OTHER" /note="Inverted nucleotide"
ccaguauuaaauccuuaagagat

SEQ ID NO: 480 - DNA, 23 bp, Artificial Sequence
  Description of Artificial Sequence: Synthetic oligonucleotide
  Description of Combined DNA/RNA Molecule: Synthetic oligonucleotide
  N-term hydroxyl group
  C-term hydroxyl group
  modified_base 1..1: /mod_base="OTHER" /note="2'-OMe-nucleotide"
  modified_base 2..2: /mod_base="OTHER" /note="2'-OMe-nucleotide"
  modified_base 3..3: /mod_base="OTHER" /note="2'-OMe-nucleotide"
  modified_base 4..4: /mod_base="OTHER" /note="2'-fluoro-nucleotide"
  modified_base 5..5: /mod_base="OTHER" /note="2'-OMe-nucleotide"
  modified_base 6..6: /mod_base="OTHER" /note="2'-fluoro-nucleotide"
  modified_base 7..7: /mod_base="OTHER" /note="2'-OMe-nucleotide"
  modified_base 8..8: /mod_base="OTHER" /note="2'-fluoro-nucleotide"
  modified_base 9..9: /mod_base="OTHER" /note="2'-OMe-nucleotide"
  modified_base 10..10: /mod_base="OTHER" /note="2'-fluoro-nucleotide"
  modified_base 11..11: /mod_base="OTHER" /note="2'-OMe-nucleotide"
  modified_base 12..12: /mod_base="OTHER" /note="2'-fluoro-nucleotide"
  modified_base 13..13: /mod_base="OTHER" /note="2'-OMe-nucleotide"
  modified_base 14..14: /mod_base="OTHER" /note="2'-fluoro-nucleotide"
  modified_base 15..15: /mod_base="OTHER" /note="2'-OMe-nucleotide"
  modified_base 16..16: /mod_base="OTHER" /note="2'-fluoro-nucleotide"
  modified_base 17..17: /mod_base="OTHER" /note="2'-OMe-nucleotide"
  modified_base 18..18: /mod_base="OTHER" /note="2'-fluoro-nucleotide"
  modified_base 19..19: /mod_base="OTHER" /note="2'-OMe-nucleotide"
  modified_base 20..20: /mod_base="OTHER" /note="2'-fluoro-nucleotide"
  modified_base 21..21: /mod_base="OTHER" /note="2'-OMe-nucleotide"
  modified_base 22..22: /mod_base="OTHER" /note="2'-fluoro-nucleotide"
  modified_base 23..23: /mod_base="OTHER" /note="Inverted nucleotide"
ccaauuuaagauuaaacauacat

SEQ ID NO: 481 - DNA, 23 bp, Artificial Sequence
  Description of Artificial Sequence: Synthetic oligonucleotide
  Description of Combined DNA/RNA Molecule: Synthetic oligonucleotide
  N-term hydroxyl group
  C-term hydroxyl group
  modified_base 1..1: /mod_base="OTHER" /note="2'-OMe-nucleotide"
  modified_base 2..2: /mod_base="OTHER" /note="2'-OMe-nucleotide"
  modified_base 3..3: /mod_base="OTHER" /note="2'-OMe-nucleotide"
  modified_base 4..4: /mod_base="OTHER" /note="2'-fluoro-nucleotide"
  modified_base 5..5: /mod_base="OTHER" /note="2'-OMe-nucleotide"
  modified_base 6..6: /mod_base="OTHER" /note="2'-fluoro-nucleotide"
  modified_base 7..7: /mod_base="OTHER" /note="2'-OMe-nucleotide"
  modified_base 8..8: /mod_base="OTHER" /note="2'-fluoro-nucleotide"
  modified_base 9..9: /mod_base="OTHER" /note="2'-OMe-nucleotide"
  modified_base 10..10: /mod_base="OTHER" /note="2'-fluoro-nucleotide"
  modified_base 11..11: /mod_base="OTHER" /note="2'-OMe-nucleotide"
  modified_base 12..12: /mod_base="OTHER" /note="2'-fluoro-nucleotide"
  modified_base 13..13: /mod_base="OTHER" /note="2'-OMe-nucleotide"
  modified_base 14..14: /mod_base="OTHER" /note="2'-fluoro-nucleotide"
  modified_base 15..15: /mod_base="OTHER" /note="2'-OMe-nucleotide"
  modified_base 16..16: /mod_base="OTHER" /note="2'-fluoro-nucleotide"
  modified_base 17..17: /mod_base="OTHER" /note="2'-OMe-nucleotide"
  modified_base 18..18: /mod_base="OTHER" /note="2'-fluoro-nucleotide"
  modified_base 19..19: /mod_base="OTHER" /note="2'-OMe-nucleotide"
  modified_base 20..20: /mod_base="OTHER" /note="2'-fluoro-nucleotide"
  modified_base 21..21: /mod_base="OTHER" /note="2'-OMe-nucleotide"
  modified_base 22..22: /mod_base="OTHER" /note="2'-fluoro-nucleotide"
  modified_base 23..23: /mod_base="OTHER" /note="Inverted nucleotide"
ccaaagauuaaacauacaaucat

SEQ ID NO: 482 - DNA, 23 bp, Artificial Sequence
  Description of Artificial Sequence: Synthetic oligonucleotide
  Description of Combined DNA/RNA Molecule: Synthetic oligonucleotide
  N-term hydroxyl group
  C-term hydroxyl group
  modified_base 1..1: /mod_base="OTHER" /note="2'-OMe-nucleotide"
  modified_base 2..2: /mod_base="OTHER" /note="2'-OMe-nucleotide"
  modified_base 3..3: /mod_base="OTHER" /note="2'-OMe-nucleotide"
  modified_base 4..4: /mod_base="OTHER" /note="2'-fluoro-nucleotide"
  modified_base 5..5: /mod_base="OTHER" /note="2'-OMe-nucleotide"
  modified_base 6..6: /mod_base="OTHER" /note="2'-fluoro-nucleotide"
  modified_base 7..7: /mod_base="OTHER" /note="2'-OMe-nucleotide"
  modified_base 8..8: /mod_base="OTHER" /note="2'-fluoro-nucleotide"
  modified_base 9..9: /mod_base="OTHER" /note="2'-OMe-nucleotide"
  modified_base 10..10: /mod_base="OTHER" /note="2'-fluoro-nucleotide"
  modified_base 11..11: /mod_base="OTHER" /note="2'-OMe-nucleotide"
  modified_base 12..12: /mod_base="OTHER" /note="2'-fluoro-nucleotide"
  modified_base 13..13: /mod_base="OTHER" /note="2'-OMe-nucleotide"
  modified_base 14..14: /mod_base="OTHER" /note="2'-fluoro-nucleotide"
  modified_base 15..15: /mod_base="OTHER" /note="2'-OMe-nucleotide"
  modified_base 16..16: /mod_base="OTHER" /note="2'-fluoro-nucleotide"
  modified_base 17..17: /mod_base="OTHER" /note="2'-OMe-nucleotide"
  modified_base 18..18: /mod_base="OTHER" /note="2'-fluoro-nucleotide"
  modified_base 19..19: /mod_base="OTHER" /note="2'-OMe-nucleotide"
  modified_base 20..20: /mod_base="OTHER" /note="2'-fluoro-nucleotide"
  modified_base 21..21: /mod_base="OTHER" /note="2'-OMe-nucleotide"
  modified_base 22..22: /mod_base="OTHER" /note="2'-fluoro-nucleotide"
  modified_base 23..23: /mod_base="OTHER" /note="Inverted nucleotide"
ccaagauuaaacauacaaucact

SEQ ID NO: 483 - DNA, 23 bp, Artificial Sequence
  Description of Artificial Sequence: Synthetic oligonucleotide
  Description of Combined DNA/RNA Molecule: Synthetic oligonucleotide
  N-term hydroxyl group
  C-term hydroxyl group
  modified_base 1..1: /mod_base="OTHER" /note="2'-OMe-nucleotide"
  modified_base 2..2: /mod_base="OTHER" /note="2'-OMe-nucleotide"
  modified_base 3..3: /mod_base="OTHER" /note="2'-OMe-nucleotide"
  modified_base 4..4: /mod_base="OTHER" /note="2'-fluoro-nucleotide"
  modified_base 5..5: /mod_base="OTHER" /note="2'-OMe-nucleotide"
  modified_base 6..6: /mod_base="OTHER" /note="2'-fluoro-nucleotide"
  modified_base 7..7: /mod_base="OTHER" /note="2'-OMe-nucleotide"
  modified_base 8..8: /mod_base="OTHER" /note="2'-fluoro-nucleotide"
  modified_base 9..9: /mod_base="OTHER" /note="2'-OMe-nucleotide"
  modified_base 10..10: /mod_base="OTHER" /note="2'-fluoro-nucleotide"
  modified_base 11..11: /mod_base="OTHER" /note="2'-OMe-nucleotide"
  modified_base 12..12: /mod_base="OTHER" /note="2'-fluoro-nucleotide"
  modified_base 13..13: /mod_base="OTHER" /note="2'-OMe-nucleotide"
  modified_base 14..14: /mod_base="OTHER" /note="2'-fluoro-nucleotide"
  modified_base 15..15: /mod_base="OTHER" /note="2'-OMe-nucleotide"
  modified_base 16..16: /mod_base="OTHER" /note="2'-fluoro-nucleotide"
  modified_base 17..17: /mod_base="OTHER" /note="2'-OMe-nucleotide"
  modified_base 18..18: /mod_base="OTHER" /note="2'-fluoro-nucleotide"
  modified_base 19..19: /mod_base="OTHER" /note="2'-OMe-nucleotide"
  modified_base 20..20: /mod_base="OTHER" /note="2'-fluoro-nucleotide"
  modified_base 21..21: /mod_base="OTHER" /note="2'-OMe-nucleotide"
  modified_base 22..22: /mod_base="OTHER" /note="2'-fluoro-nucleotide"
  modified_base 23..23: /mod_base="OTHER" /note="Inverted nucleotide"
ccagauuaaacauacaaucacat

SEQ ID NO: 484 - DNA, 23 bp, Artificial Sequence
  Description of Artificial Sequence: Synthetic oligonucleotide
  Description of Combined DNA/RNA Molecule: Synthetic oligonucleotide
  N-term hydroxyl group
  C-term hydroxyl group
  modified_base 1..1: /mod_base="OTHER" /note="2'-OMe-nucleotide"
  modified_base 2..2: /mod_base="OTHER" /note="2'-OMe-nucleotide"
  modified_base 3..3: /mod_base="OTHER" /note="2'-OMe-nucleotide"
  modified_base 4..4: /mod_base="OTHER" /note="2'-fluoro-nucleotide"
  modified_base 5..5: /mod_base="OTHER" /note="2'-OMe-nucleotide"
  modified_base 6..6: /mod_base="OTHER" /note="2'-fluoro-nucleotide"
  modified_base 7..7: /mod_base="OTHER" /note="2'-OMe-nucleotide"
  modified_base 8..8: /mod_base="OTHER" /note="2'-fluoro-nucleotide"
  modified_base 9..9: /mod_base="OTHER" /note="2'-OMe-nucleotide"
  modified_base 10..10: /mod_base="OTHER" /note="2'-fluoro-nucleotide"
  modified_base 11..11: /mod_base="OTHER" /note="2'-OMe-nucleotide"
  modified_base 12..12: /mod_base="OTHER" /note="2'-fluoro-nucleotide"
  modified_base 13..13: /mod_base="OTHER" /note="2'-OMe-nucleotide"
  modified_base 14..14: /mod_base="OTHER" /note="2'-fluoro-nucleotide"
  modified_base 15..15: /mod_base="OTHER" /note="2'-OMe-nucleotide"
  modified_base 16..16: /mod_base="OTHER" /note="2'-fluoro-nucleotide"
  modified_base 17..17: /mod_base="OTHER" /note="2'-OMe-nucleotide"
  modified_base 18..18: /mod_base="OTHER" /note="2'-fluoro-nucleotide"
  modified_base 19..19: /mod_base="OTHER" /note="2'-OMe-nucleotide"
  modified_base 20..20: /mod_base="OTHER" /note="2'-fluoro-nucleotide"
  modified_base 21..21: /mod_base="OTHER" /note="2'-OMe-nucleotide"
  modified_base 22..22: /mod_base="OTHER" /note="2'-fluoro-nucleotide"
  modified_base 23..23: /mod_base="OTHER" /note="Inverted nucleotide"
ccaaaacauacaaucacauaact

SEQ ID NO: 485 - DNA, 23 bp, Artificial Sequence
  Description of Artificial Sequence: Synthetic oligonucleotide
  Description of Combined DNA/RNA Molecule: Synthetic oligonucleotide
  N-term hydroxyl group
  C-term hydroxyl group
  modified_base 1..1: /mod_base="OTHER" /note="2'-OMe-nucleotide"
  modified_base 2..2: /mod_base="OTHER" /note="2'-OMe-nucleotide"
  modified_base 3..3: /mod_base="OTHER" /note="2'-OMe-nucleotide"
  modified_base 4..4: /mod_base="OTHER" /note="2'-fluoro-nucleotide"
  modified_base 5..5: /mod_base="OTHER" /note="2'-OMe-nucleotide"
  modified_base 6..6: /mod_base="OTHER" /note="2'-fluoro-nucleotide"
  modified_base 7..7: /mod_base="OTHER" /note="2'-OMe-nucleotide"
  modified_base 8..8: /mod_base="OTHER" /note="2'-fluoro-nucleotide"
  modified_base 9..9: /mod_base="OTHER" /note="2'-OMe-nucleotide"
  modified_base 10..10: /mod_base="OTHER" /note="2'-fluoro-nucleotide"
  modified_base 11..11: /mod_base="OTHER" /note="2'-OMe-nucleotide"
  modified_base 12..12: /mod_base="OTHER" /note="2'-fluoro-nucleotide"
  modified_base 13..13: /mod_base="OTHER" /note="2'-OMe-nucleotide"
  modified_base 14..14: /mod_base="OTHER" /note="2'-fluoro-nucleotide"
  modified_base 15..15: /mod_base="OTHER" /note="2'-OMe-nucleotide"
  modified_base 16..16: /mod_base="OTHER" /note="2'-fluoro-nucleotide"
  modified_base 17..17: /mod_base="OTHER" /note="2'-OMe-nucleotide"
  modified_base 18..18: /mod_base="OTHER" /note="2'-fluoro-nucleotide"
  modified_base 19..19: /mod_base="OTHER" /note="2'-OMe-nucleotide"
  modified_base 20..20: /mod_base="OTHER" /note="2'-fluoro-nucleotide"
  modified_base 21..21: /mod_base="OTHER" /note="2'-OMe-nucleotide"
  modified_base 22..22: /mod_base="OTHER" /note="2'-fluoro-nucleotide"
  modified_base 23..23: /mod_base="OTHER" /note="Inverted nucleotide"
ccaaacauacaaucacauaacct

SEQ ID NO: 486 - DNA, 23 bp, Artificial Sequence
  Description of Artificial Sequence: Synthetic oligonucleotide
  Description of Combined DNA/RNA Molecule: Synthetic oligonucleotide
  N-term hydroxyl group
  C-term hydroxyl group
  modified_base 1..1: /mod_base="OTHER" /note="2'-OMe-nucleotide"
  modified_base 2..2: /mod_base="OTHER" /note="2'-OMe-nucleotide"
  modified_base 3..3: /mod_base="OTHER" /note="2'-OMe-nucleotide"
  modified_base 4..4: /mod_base="OTHER" /note="2'-fluoro-nucleotide"
  modified_base 5..5: /mod_base="OTHER" /note="2'-OMe-nucleotide"
  modified_base 6..6: /mod_base="OTHER" /note="2'-fluoro-nucleotide"
  modified_base 7..7: /mod_base="OTHER" /note="2'-OMe-nucleotide"
  modified_base 8..8: /mod_base="OTHER" /note="2'-fluoro-nucleotide"
  modified_base 9..9: /mod_base="OTHER" /note="2'-OMe-nucleotide"
  modified_base 10..10: /mod_base="OTHER" /note="2'-fluoro-nucleotide"
  modified_base 11..11: /mod_base="OTHER" /note="2'-OMe-nucleotide"
  modified_base 12..12: /mod_base="OTHER" /note="2'-fluoro-nucleotide"
  modified_base 13..13: /mod_base="OTHER" /note="2'-OMe-nucleotide"
  modified_base 14..14: /mod_base="OTHER" /note="2'-fluoro-nucleotide"
  modified_base 15..15: /mod_base="OTHER" /note="2'-OMe-nucleotide"
  modified_base 16..16: /mod_base="OTHER" /note="2'-fluoro-nucleotide"
  modified_base 17..17: /mod_base="OTHER" /note="2'-OMe-nucleotide"
  modified_base 18..18: /mod_base="OTHER" /note="2'-fluoro-nucleotide"
  modified_base 19..19: /mod_base="OTHER" /note="2'-OMe-nucleotide"
  modified_base 20..20: /mod_base="OTHER" /note="2'-fluoro-nucleotide"
  modified_base 21..21: /mod_base="OTHER" /note="2'-OMe-nucleotide"
  modified_base 22..22: /mod_base="OTHER" /note="2'-fluoro-nucleotide"
  modified_base 23..23: /mod_base="OTHER" /note="Inverted nucleotide"
ccaacauacaaucacauaaccut

SEQ ID NO: 487 - DNA, 23 bp, Artificial Sequence
  Description of Artificial Sequence: Synthetic oligonucleotide
  Description of Combined DNA/RNA Molecule: Synthetic oligonucleotide
  N-term hydroxyl group
  C-term hydroxyl group
  modified_base 1..1: /mod_base="OTHER" /note="2'-OMe-nucleotide"
  modified_base 2..2: /mod_base="OTHER" /note="2'-OMe-nucleotide"
  modified_base 3..3: /mod_base="OTHER" /note="2'-OMe-nucleotide"
  modified_base 4..4: /mod_base="OTHER" /note="2'-fluoro-nucleotide"
  modified_base 5..5: /mod_base="OTHER" /note="2'-OMe-nucleotide"
  modified_base 6..6: /mod_base="OTHER" /note="2'-fluoro-nucleotide"
  modified_base 7..7: /mod_base="OTHER" /note="2'-OMe-nucleotide"
  modified_base 8..8: /mod_base="OTHER" /note="2'-fluoro-nucleotide"
  modified_base 9..9: /mod_base="OTHER" /note="2'-OMe-nucleotide"
  modified_base 10..10: /mod_base="OTHER" /note="2'-fluoro-nucleotide"
  modified_base 11..11: /mod_base="OTHER" /note="2'-OMe-nucleotide"
  modified_base 12..12: /mod_base="OTHER" /note="2'-fluoro-nucleotide"
  modified_base 13..13: /mod_base="OTHER" /note="2'-OMe-nucleotide"
  modified_base 14..14: /mod_base="OTHER" /note="2'-fluoro-nucleotide"
  modified_base 15..15: /mod_base="OTHER" /note="2'-OMe-nucleotide"
  modified_base 16..16: /mod_base="OTHER" /note="2'-fluoro-nucleotide"
  modified_base 17..17: /mod_base="OTHER" /note="2'-OMe-nucleotide"
  modified_base 18..18: /mod_base="OTHER" /note="2'-fluoro-nucleotide"
  modified_base 19..19: /mod_base="OTHER" /note="2'-OMe-nucleotide"
  modified_base 20..20: /mod_base="OTHER" /note="2'-fluoro-nucleotide"
  modified_base 21..21: /mod_base="OTHER" /note="2'-OMe-nucleotide"
  modified_base 22..22: /mod_base="OTHER" /note="2'-fluoro-nucleotide"
  modified_base 23..23: /mod_base="OTHER" /note="Inverted nucleotide"
ccaauacaaucacauaaccuuat

SEQ ID NO: 488 - DNA, 23 bp, Artificial Sequence
  Description of Artificial Sequence: Synthetic oligonucleotide
  Description of Combined DNA/RNA Molecule: Synthetic oligonucleotide
  N-term hydroxyl group
  C-term hydroxyl group
  modified_base 1..1: /mod_base="OTHER" /note="2'-OMe-nucleotide"
  modified_base 2..2: /mod_base="OTHER" /note="2'-OMe-nucleotide"
  modified_base 3..3: /mod_base="OTHER" /note="2'-OMe-nucleotide"
  modified_base 4..4: /mod_base="OTHER" /note="2'-fluoro-nucleotide"
  modified_base 5..5: /mod_base="OTHER" /note="2'-OMe-nucleotide"
  modified_base 6..6: /mod_base="OTHER" /note="2'-fluoro-nucleotide"
  modified_base 7..7: /mod_base="OTHER" /note="2'-OMe-nucleotide"
  modified_base 8..8: /mod_base="OTHER" /note="2'-fluoro-nucleotide"
  modified_base 9..9: /mod_base="OTHER" /note="2'-OMe-nucleotide"
  modified_base 10..10: /mod_base="OTHER" /note="2'-fluoro-nucleotide"
  modified_base 11..11: /mod_base="OTHER" /note="2'-OMe-nucleotide"
  modified_base 12..12: /mod_base="OTHER" /note="2'-fluoro-nucleotide"
  modified_base 13..13: /mod_base="OTHER" /note="2'-OMe-nucleotide"
  modified_base 14..14: /mod_base="OTHER" /note="2'-fluoro-nucleotide"
  modified_base 15..15: /mod_base="OTHER" /note="2'-OMe-nucleotide"
  modified_base 16..16: /mod_base="OTHER" /note="2'-fluoro-nucleotide"
  modified_base 17..17: /mod_base="OTHER" /note="2'-OMe-nucleotide"
  modified_base 18..18: /mod_base="OTHER" /note="2'-fluoro-nucleotide"
  modified_base 19..19: /mod_base="OTHER" /note="2'-OMe-nucleotide"
  modified_base 20..20: /mod_base="OTHER" /note="2'-fluoro-nucleotide"
  modified_base 21..21: /mod_base="OTHER" /note="2'-OMe-nucleotide"
  modified_base 22..22: /mod_base="OTHER" /note="2'-fluoro-nucleotide"
  modified_base 23..23: /mod_base="OTHER" /note="Inverted nucleotide"
ccaacaaucacauaaccuuaaat

SEQ ID NO: 489 - DNA, 23 bp, Artificial Sequence
  Description of Artificial Sequence: Synthetic oligonucleotide
  Description of Combined DNA/RNA Molecule: Synthetic oligonucleotide
  N-term hydroxyl group
  C-term hydroxyl group
  modified_base 1..1: /mod_base="OTHER" /note="2'-OMe-nucleotide"
  modified_base 2..2: /mod_base="OTHER" /note="2'-OMe-nucleotide"
  modified_base 3..3: /mod_base="OTHER" /note="2'-OMe-nucleotide"
  modified_base 4..4: /mod_base="OTHER" /note="2'-fluoro-nucleotide"
  modified_base 5..5: /mod_base="OTHER" /note="2'-OMe-nucleotide"
  modified_base 6..6: /mod_base="OTHER" /note="2'-fluoro-nucleotide"
  modified_base 7..7: /mod_base="OTHER" /note="2'-OMe-nucleotide"
  modified_base 8..8: /mod_base="OTHER" /note="2'-fluoro-nucleotide"
  modified_base 9..9: /mod_base="OTHER" /note="2'-OMe-nucleotide"
  modified_base 10..10: /mod_base="OTHER" /note="2'-fluoro-nucleotide"
  modified_base 11..11: /mod_base="OTHER" /note="2'-OMe-nucleotide"
  modified_base 12..12: /mod_base="OTHER" /note="2'-fluoro-nucleotide"
  modified_base 13..13: /mod_base="OTHER" /note="2'-OMe-nucleotide"
  modified_base 14..14: /mod_base="OTHER" /note="2'-fluoro-nucleotide"
  modified_base 15..15: /mod_base="OTHER" /note="2'-OMe-nucleotide"
  modified_base 16..16: /mod_base="OTHER" /note="2'-fluoro-nucleotide"
  modified_base 17..17: /mod_base="OTHER" /note="2'-OMe-nucleotide"
  modified_base 18..18: /mod_base="OTHER" /note="2'-fluoro-nucleotide"
  modified_base 19..19: /mod_base="OTHER" /note="2'-OMe-nucleotide"
  modified_base 20..20: /mod_base="OTHER" /note="2'-fluoro-nucleotide"
  modified_base 21..21: /mod_base="OTHER" /note="2'-OMe-nucleotide"
  modified_base 22..22: /mod_base="OTHER" /note="2'-fluoro-nucleotide"
  modified_base 23..23: /mod_base="OTHER" /note="Inverted nucleotide"
ccacaaucacauaaccuuaaagt

SEQ ID NO: 490 - DNA, 23 bp, Artificial Sequence
  Description of Artificial Sequence: Synthetic oligonucleotide
  Description of Combined DNA/RNA Molecule: Synthetic oligonucleotide
  N-term hydroxyl group
  C-term hydroxyl group
  modified_base 1..1: /mod_base="OTHER" /note="2'-OMe-nucleotide"
  modified_base 2..2: /mod_base="OTHER" /note="2'-OMe-nucleotide"
  modified_base 3..3: /mod_base="OTHER" /note="2'-OMe-nucleotide"
  modified_base 4..4: /mod_base="OTHER" /note="2'-fluoro-nucleotide"
  modified_base 5..5: /mod_base="OTHER" /note="2'-OMe-nucleotide"
  modified_base 6..6: /mod_base="OTHER" /note="2'-fluoro-nucleotide"
  modified_base 7..7: /mod_base="OTHER" /note="2'-OMe-nucleotide"
  modified_base 8..8: /mod_base="OTHER" /note="2'-fluoro-nucleotide"
  modified_base 9..9: /mod_base="OTHER" /note="2'-OMe-nucleotide"
  modified_base 10..10: /mod_base="OTHER" /note="2'-fluoro-nucleotide"
  modified_base 11..11: /mod_base="OTHER" /note="2'-OMe-nucleotide"
  modified_base 12..12: /mod_base="OTHER" /note="2'-fluoro-nucleotide"
  modified_base 13..13: /mod_base="OTHER" /note="2'-OMe-nucleotide"
  modified_base 14..14: /mod_base="OTHER" /note="2'-fluoro-nucleotide"
  modified_base 15..15: /mod_base="OTHER" /note="2'-OMe-nucleotide"
  modified_base 16..16: /mod_base="OTHER" /note="2'-fluoro-nucleotide"
  modified_base 17..17: /mod_base="OTHER" /note="2'-OMe-nucleotide"
  modified_base 18..18: /mod_base="OTHER" /note="2'-fluoro-nucleotide"
  modified_base 19..19: /mod_base="OTHER" /note="2'-OMe-nucleotide"
  modified_base 20..20: /mod_base="OTHER" /note="2'-fluoro-nucleotide"
  modified_base 21..21: /mod_base="OTHER" /note="2'-OMe-nucleotide"
  modified_base 22..22: /mod_base="OTHER" /note="2'-fluoro-nucleotide"
  modified_base 23..23: /mod_base="OTHER" /note="Inverted nucleotide"
ccaaaucacauaaccuuaaagat

SEQ ID NO: 491 - DNA, 23 bp, Artificial Sequence
  Description of Artificial Sequence: Synthetic oligonucleotide
  Description of Combined DNA/RNA Molecule: Synthetic oligonucleotide
  N-term hydroxyl group
  C-term hydroxyl group
  modified_base 1..1: /mod_base="OTHER" /note="2'-OMe-nucleotide"
  modified_base 2..2: /mod_base="OTHER" /note="2'-OMe-nucleotide"
  modified_base 3..3: /mod_base="OTHER" /note="2'-OMe-nucleotide"
  modified_base 4..4: /mod_base="OTHER" /note="2'-fluoro-nucleotide"
  modified_base 5..5: /mod_base="OTHER" /note="2'-OMe-nucleotide"
  modified_base 6..6: /mod_base="OTHER" /note="2'-fluoro-nucleotide"
  modified_base 7..7: /mod_base="OTHER" /note="2'-OMe-nucleotide"
  modified_base 8..8: /mod_base="OTHER" /note="2'-fluoro-nucleotide"
  modified_base 9..9: /mod_base="OTHER" /note="2'-OMe-nucleotide"
  modified_base 10..10: /mod_base="OTHER" /note="2'-fluoro-nucleotide"
  modified_base 11..11: /mod_base="OTHER" /note="2'-OMe-nucleotide"
  modified_base 12..12: /mod_base="OTHER" /note="2'-fluoro-nucleotide"
  modified_base 13..13: /mod_base="OTHER" /note="2'-OMe-nucleotide"
  modified_base 14..14: /mod_base="OTHER" /note="2'-fluoro-nucleotide"
  modified_base 15..15: /mod_base="OTHER" /note="2'-OMe-nucleotide"
  modified_base 16..16: /mod_base="OTHER" /note="2'-fluoro-nucleotide"
  modified_base 17..17: /mod_base="OTHER" /note="2'-OMe-nucleotide"
  modified_base 18..18: /mod_base="OTHER" /note="2'-fluoro-nucleotide"
  modified_base 19..19: /mod_base="OTHER" /note="2'-OMe-nucleotide"
  modified_base 20..20: /mod_base="OTHER" /note="2'-fluoro-nucleotide"
  modified_base 21..21: /mod_base="OTHER" /note="2'-OMe-nucleotide"
  modified_base 22..22: /mod_base="OTHER" /note="2'-fluoro-nucleotide"
  modified_base 23..23: /mod_base="OTHER" /note="Inverted nucleotide"
ccaaucacauaaccuuaaagaat

SEQ ID NO: 492 - DNA, 23 bp, Artificial Sequence
  Description of Artificial Sequence: Synthetic oligonucleotide
  Description of Combined DNA/RNA Molecule: Synthetic oligonucleotide
  N-term hydroxyl group
  C-term hydroxyl group
  modified_base 1..1: /mod_base="OTHER" /note="2'-OMe-nucleotide"
  modified_base 2..2: /mod_base="OTHER" /note="2'-OMe-nucleotide"
  modified_base 3..3: /mod_base="OTHER" /note="2'-OMe-nucleotide"
  modified_base 4..4: /mod_base="OTHER" /note="2'-fluoro-nucleotide"
  modified_base 5..5: /mod_base="OTHER" /note="2'-OMe-nucleotide"
  modified_base 6..6: /mod_base="OTHER" /note="2'-fluoro-nucleotide"
  modified_base 7..7: /mod_base="OTHER" /note="2'-OMe-nucleotide"
  modified_base 8..8: /mod_base="OTHER" /note="2'-fluoro-nucleotide"
  modified_base 9..9: /mod_base="OTHER" /note="2'-OMe-nucleotide"
  modified_base 10..10: /mod_base="OTHER" /note="2'-fluoro-nucleotide"
  modified_base 11..11: /mod_base="OTHER" /note="2'-OMe-nucleotide"
  modified_base 12..12: /mod_base="OTHER" /note="2'-fluoro-nucleotide"
  modified_base 13..13: /mod_base="OTHER" /note="2'-OMe-nucleotide"
  modified_base 14..14: /mod_base="OTHER" /note="2'-fluoro-nucleotide"
  modified_base 15..15: /mod_base="OTHER" /note="2'-OMe-nucleotide"
  modified_base 16..16: /mod_base="OTHER" /note="2'-fluoro-nucleotide"
  modified_base 17..17: /mod_base="OTHER" /note="2'-OMe-nucleotide"
  modified_base 18..18: /mod_base="OTHER" /note="2'-fluoro-nucleotide"
  modified_base 19..19: /mod_base="OTHER" /note="2'-OMe-nucleotide"
  modified_base 20..20: /mod_base="OTHER" /note="2'-fluoro-nucleotide"
  modified_base 21..21: /mod_base="OTHER" /note="2'-OMe-nucleotide"
  modified_base 22..22: /mod_base="OTHER" /note="2'-fluoro-nucleotide"
  modified_base 23..23: /mod_base="OTHER" /note="Inverted nucleotide"
ccaucacauaaccuuaaagaaut

SEQ ID NO: 493 - DNA, 23 bp, Artificial Sequence
  Description of Artificial Sequence: Synthetic oligonucleotide
  Description of Combined DNA/RNA Molecule: Synthetic oligonucleotide
  N-term hydroxyl group
  C-term hydroxyl group
  modified_base 1..1: /mod_base="OTHER" /note="2'-OMe-nucleotide"
  modified_base 2..2: /mod_base="OTHER" /note="2'-OMe-nucleotide"
  modified_base 3..3: /mod_base="OTHER" /note="2'-OMe-nucleotide"
  modified_base 4..4: /mod_base="OTHER" /note="2'-fluoro-nucleotide"
  modified_base 5..5: /mod_base="OTHER" /note="2'-OMe-nucleotide"
  modified_base 6..6: /mod_base="OTHER" /note="2'-fluoro-nucleotide"
  modified_base 7..7: /mod_base="OTHER" /note="2'-OMe-nucleotide"
  modified_base 8..8: /mod_base="OTHER" /note="2'-fluoro-nucleotide"
  modified_base 9..9: /mod_base="OTHER" /note="2'-OMe-nucleotide"
  modified_base 10..10: /mod_base="OTHER" /note="2'-fluoro-nucleotide"
  modified_base 11..11: /mod_base="OTHER" /note="2'-OMe-nucleotide"
  modified_base 12..12: /mod_base="OTHER" /note="2'-fluoro-nucleotide"
  modified_base 13..13: /mod_base="OTHER" /note="2'-OMe-nucleotide"
  modified_base 14..14: /mod_base="OTHER" /note="2'-fluoro-nucleotide"
  modified_base 15..15: /mod_base="OTHER" /note="2'-OMe-nucleotide"
  modified_base 16..16: /mod_base="OTHER" /note="2'-fluoro-nucleotide"
  modified_base 17..17: /mod_base="OTHER" /note="2'-OMe-nucleotide"
  modified_base 18..18: /mod_base="OTHER" /note="2'-fluoro-nucleotide"
  modified_base 19..19: /mod_base="OTHER" /note="2'-OMe-nucleotide"
  modified_base 20..20: /mod_base="OTHER" /note="2'-fluoro-nucleotide"
  modified_base 21..21: /mod_base="OTHER" /note="2'-OMe-nucleotide"
  modified_base 22..22: /mod_base="OTHER" /note="2'-fluoro-nucleotide"
  modified_base 23..23: /mod_base="OTHER" /note="Inverted nucleotide"
ccacacauaaccuuaaagaauat

SEQ ID NO: 494 - DNA, 23 bp, Artificial Sequence
  Description of Artificial Sequence: Synthetic oligonucleotide
  Description of Combined DNA/RNA Molecule: Synthetic oligonucleotide
  N-term hydroxyl group
  C-term hydroxyl group
  modified_base 1..1: /mod_base="OTHER" /note="2'-OMe-nucleotide"
  modified_base 2..2: /mod_base="OTHER" /note="2'-OMe-nucleotide"
  modified_base 3..3: /mod_base="OTHER" /note="2'-OMe-nucleotide"
  modified_base 4..4: /mod_base="OTHER" /note="2'-fluoro-nucleotide"
  modified_base 5..5: /mod_base="OTHER" /note="2'-OMe-nucleotide"
  modified_base 6..6: /mod_base="OTHER" /note="2'-fluoro-nucleotide"
  modified_base 7..7: /mod_base="OTHER" /note="2'-OMe-nucleotide"
  modified_base 8..8: /mod_base="OTHER" /note="2'-fluoro-nucleotide"
  modified_base 9..9: /mod_base="OTHER" /note="2'-OMe-nucleotide"
  modified_base 10..10: /mod_base="OTHER" /note="2'-fluoro-nucleotide"
  modified_base 11..11: /mod_base="OTHER" /note="2'-OMe-nucleotide"
  modified_base 12..12: /mod_base="OTHER" /note="2'-fluoro-nucleotide"
  modified_base 13..13: /mod_base="OTHER" /note="2'-OMe-nucleotide"
  modified_base 14..14: /mod_base="OTHER" /note="2'-fluoro-nucleotide"
  modified_base 15..15: /mod_base="OTHER" /note="2'-OMe-nucleotide"
  modified_base 16..16: /mod_base="OTHER" /note="2'-fluoro-nucleotide"
  modified_base 17..17: /mod_base="OTHER" /note="2'-OMe-nucleotide"
  modified_base 18..18: /mod_base="OTHER" /note="2'-fluoro-nucleotide"
  modified_base 19..19: /mod_base="OTHER" /note="2'-OMe-nucleotide"
  modified_base 20..20: /mod_base="OTHER" /note="2'-fluoro-nucleotide"
  modified_base 21..21: /mod_base="OTHER" /note="2'-OMe-nucleotide"
  modified_base 22..22: /mod_base="OTHER" /note="2'-fluoro-nucleotide"
  modified_base 23..23: /mod_base="OTHER" /note="Inverted nucleotide"
ccaacauaaccuuaaagaauact

SEQ ID NO: 495 - DNA, 23 bp, Artificial Sequence
  Description of Artificial Sequence: Synthetic oligonucleotide
  Description of Combined DNA/RNA Molecule: Synthetic oligonucleotide
  N-term hydroxyl group
  C-term hydroxyl group
  modified_base 1..1: /mod_base="OTHER" /note="2'-OMe-nucleotide"
  modified_base 2..2: /mod_base="OTHER" /note="2'-OMe-nucleotide"
  modified_base 3..3: /mod_base="OTHER" /note="2'-OMe-nucleotide"
  modified_base 4..4: /mod_base="OTHER" /note="2'-fluoro-nucleotide"
  modified_base 5..5: /mod_base="OTHER" /note="2'-OMe-nucleotide"
  modified_base 6..6: /mod_base="OTHER" /note="2'-fluoro-nucleotide"
  modified_base 7..7: /mod_base="OTHER" /note="2'-OMe-nucleotide"
  modified_base 8..8: /mod_base="OTHER" /note="2'-fluoro-nucleotide"
  modified_base 9..9: /mod_base="OTHER" /note="2'-OMe-nucleotide"
  modified_base 10..10: /mod_base="OTHER" /note="2'-fluoro-nucleotide"
  modified_base 11..11: /mod_base="OTHER" /note="2'-OMe-nucleotide"
  modified_base 12..12: /mod_base="OTHER" /note="2'-fluoro-nucleotide"
  modified_base 13..13: /mod_base="OTHER" /note="2'-OMe-nucleotide"
  modified_base 14..14: /mod_base="OTHER" /note="2'-fluoro-nucleotide"
  modified_base 15..15: /mod_base="OTHER" /note="2'-OMe-nucleotide"
  modified_base 16..16: /mod_base="OTHER" /note="2'-fluoro-nucleotide"
  modified_base 17..17: /mod_base="OTHER" /note="2'-OMe-nucleotide"
  modified_base 18..18: /mod_base="OTHER" /note="2'-fluoro-nucleotide"
  modified_base 19..19: /mod_base="OTHER" /note="2'-OMe-nucleotide"
  modified_base 20..20: /mod_base="OTHER" /note="2'-fluoro-nucleotide"
  modified_base 21..21: /mod_base="OTHER" /note="2'-OMe-nucleotide"
  modified_base 22..22: /mod_base="OTHER" /note="2'-fluoro-nucleotide"
  modified_base 23..23: /mod_base="OTHER" /note="Inverted nucleotide"
ccacauaaccuuaaagaauacct

SEQ ID NO: 496 - DNA, 23 bp, Artificial Sequence
  Description of Artificial Sequence: Synthetic oligonucleotide
  Description of Combined DNA/RNA Molecule: Synthetic oligonucleotide
  N-term hydroxyl group
  C-term hydroxyl group
  modified_base 1..1: /mod_base="OTHER" /note="2'-OMe-nucleotide"
  modified_base 2..2: /mod_base="OTHER" /note="2'-OMe-nucleotide"
  modified_base 3..3: /mod_base="OTHER" /note="2'-OMe-nucleotide"
  modified_base 4..4: /mod_base="OTHER" /note="2'-fluoro-nucleotide"
  modified_base 5..5: /mod_base="OTHER" /note="2'-OMe-nucleotide"
  modified_base 6..6: /mod_base="OTHER" /note="2'-fluoro-nucleotide"
  modified_base 7..7: /mod_base="OTHER" /note="2'-OMe-nucleotide"
  modified_base 8..8: /mod_base="OTHER" /note="2'-fluoro-nucleotide"
  modified_base 9..9: /mod_base="OTHER" /note="2'-OMe-nucleotide"
  modified_base 10..10: /mod_base="OTHER" /note="2'-fluoro-nucleotide"
  modified_base 11..11: /mod_base="OTHER" /note="2'-OMe-nucleotide"
  modified_base 12..12: /mod_base="OTHER" /note="2'-fluoro-nucleotide"
  modified_base 13..13: /mod_base="OTHER" /note="2'-OMe-nucleotide"
  modified_base 14..14: /mod_base="OTHER" /note="2'-fluoro-nucleotide"
  modified_base 15..15: /mod_base="OTHER" /note="2'-OMe-nucleotide"
  modified_base 16..16: /mod_base="OTHER" /note="2'-fluoro-nucleotide"
  modified_base 17..17: /mod_base="OTHER" /note="2'-OMe-nucleotide"
  modified_base 18..18: /mod_base="OTHER" /note="2'-fluoro-nucleotide"
  modified_base 19..19: /mod_base="OTHER" /note="2'-OMe-nucleotide"
  modified_base 20..20: /mod_base="OTHER" /note="2'-fluoro-nucleotide"
  modified_base 21..21: /mod_base="OTHER" /note="2'-OMe-nucleotide"
  modified_base 22..22: /mod_base="OTHER" /note="2'-fluoro-nucleotide"
  modified_base 23..23: /mod_base="OTHER" /note="Inverted nucleotide"
ccacauuucucaaucaaaauuct

SEQ ID NO: 497 - DNA, 23 bp, Artificial Sequence
  Description of Artificial Sequence: Synthetic oligonucleotide
  Description of Combined DNA/RNA Molecule: Synthetic oligonucleotide
  N-term hydroxyl group
  C-term hydroxyl group
  modified_base 1..1: /mod_base="OTHER" /note="2'-OMe-nucleotide"
  modified_base 2..2: /mod_base="OTHER" /note="2'-OMe-nucleotide"
  modified_base 3..3: /mod_base="OTHER" /note="2'-OMe-nucleotide"
  modified_base 4..4: /mod_base="OTHER" /note="2'-fluoro-nucleotide"
  modified_base 5..5: /mod_base="OTHER" /note="2'-OMe-nucleotide"
  modified_base 6..6: /mod_base="OTHER" /note="2'-fluoro-nucleotide"
  modified_base 7..7: /mod_base="OTHER" /note="2'-OMe-nucleotide"
  modified_base 8..8: /mod_base="OTHER" /note="2'-fluoro-nucleotide"
  modified_base 9..9: /mod_base="OTHER" /note="2'-OMe-nucleotide"
  modified_base 10..10: /mod_base="OTHER" /note="2'-fluoro-nucleotide"
  modified_base 11..11: /mod_base="OTHER" /note="2'-OMe-nucleotide"
  modified_base 12..12: /mod_base="OTHER" /note="2'-fluoro-nucleotide"
  modified_base 13..13: /mod_base="OTHER" /note="2'-OMe-nucleotide"
  modified_base 14..14: /mod_base="OTHER" /note="2'-fluoro-nucleotide"
  modified_base 15..15: /mod_base="OTHER" /note="2'-OMe-nucleotide"
  modified_base 16..16: /mod_base="OTHER" /note="2'-fluoro-nucleotide"
  modified_base 17..17: /mod_base="OTHER" /note="2'-OMe-nucleotide"
  modified_base 18..18: /mod_base="OTHER" /note="2'-fluoro-nucleotide"
  modified_base 19..19: /mod_base="OTHER" /note="2'-OMe-nucleotide"
  modified_base 20..20: /mod_base="OTHER" /note="2'-fluoro-nucleotide"
  modified_base 21..21: /mod_base="OTHER" /note="2'-OMe-nucleotide"
  modified_base 22..22: /mod_base="OTHER" /note="2'-fluoro-nucleotide"
  modified_base 23..23: /mod_base="OTHER" /note="Inverted nucleotide"
ccauucucaaucaaaauucuuat

SEQ ID NO: 498 - DNA, 23 bp, Artificial Sequence
  Description of Artificial Sequence: Synthetic oligonucleotide
  Description of Combined DNA/RNA Molecule: Synthetic oligonucleotide
  N-term hydroxyl group
  C-term hydroxyl group
  modified_base 1..1: /mod_base="OTHER" /note="2'-OMe-nucleotide"
  modified_base 2..2: /mod_base="OTHER" /note="2'-OMe-nucleotide"
  modified_base 3..3: /mod_base="OTHER" /note="2'-OMe-nucleotide"
  modified_base 4..4: /mod_base="OTHER" /note="2'-fluoro-nucleotide"
  modified_base 5..5: /mod_base="OTHER" /note="2'-OMe-nucleotide"
  modified_base 6..6: /mod_base="OTHER" /note="2'-fluoro-nucleotide"
  modified_base 7..7: /mod_base="OTHER" /note="2'-OMe-nucleotide"
  modified_base 8..8: /mod_base="OTHER" /note="2'-fluoro-nucleotide"
  modified_base 9..9: /mod_base="OTHER" /note="2'-OMe-nucleotide"
  modified_base 10..10: /mod_base="OTHER" /note="2'-fluoro-nucleotide"
  modified_base 11..11: /mod_base="OTHER" /note="2'-OMe-nucleotide"
  modified_base 12..12: /mod_base="OTHER" /note="2'-fluoro-nucleotide"
  modified_base 13..13: /mod_base="OTHER" /note="2'-OMe-nucleotide"
  modified_base 14..14: /mod_base="OTHER" /note="2'-fluoro-nucleotide"
  modified_base 15..15: /mod_base="OTHER" /note="2'-OMe-nucleotide"
  modified_base 16..16: /mod_base="OTHER" /note="2'-fluoro-nucleotide"
  modified_base 17..17: /mod_base="OTHER" /note="2'-OMe-nucleotide"
  modified_base 18..18: /mod_base="OTHER" /note="2'-fluoro-nucleotide"
  modified_base 19..19: /mod_base="OTHER" /note="2'-OMe-nucleotide"
  modified_base 20..20: /mod_base="OTHER" /note="2'-fluoro-nucleotide"
  modified_base 21..21: /mod_base="OTHER" /note="2'-OMe-nucleotide"
  modified_base 22..22: /mod_base="OTHER" /note="2'-fluoro-nucleotide"
  modified_base 23..23: /mod_base="OTHER" /note="Inverted nucleotide"
ccaauuuugugaugugggaauct

SEQ ID NO: 499 - DNA, 23 bp, Artificial Sequence
  Description of Artificial Sequence: Synthetic oligonucleotide
  Description of Combined DNA/RNA Molecule: Synthetic oligonucleotide
  N-term hydroxyl group
  C-term hydroxyl group
  modified_base 1..1: /mod_base="OTHER" /note="2'-OMe-nucleotide"
  modified_base 2..2: /mod_base="OTHER" /note="2'-OMe-nucleotide"
  modified_base 3..3: /mod_base="OTHER" /note="2'-OMe-nucleotide"
  modified_base 4..4: /mod_base="OTHER" /note="2'-fluoro-nucleotide"
  modified_base 5..5: /mod_base="OTHER" /note="2'-OMe-nucleotide"
  modified_base 6..6: /mod_base="OTHER" /note="2'-fluoro-nucleotide"
  modified_base 7..7: /mod_base="OTHER" /note="2'-OMe-nucleotide"
  modified_base 8..8: /mod_base="OTHER" /note="2'-fluoro-nucleotide"
  modified_base 9..9: /mod_base="OTHER" /note="2'-OMe-nucleotide"
  modified_base 10..10: /mod_base="OTHER" /note="2'-fluoro-nucleotide"
  modified_base 11..11: /mod_base="OTHER" /note="2'-OMe-nucleotide"
  modified_base 12..12: /mod_base="OTHER" /note="2'-fluoro-nucleotide"
  modified_base 13..13: /mod_base="OTHER" /note="2'-OMe-nucleotide"
  modified_base 14..14: /mod_base="OTHER" /note="2'-fluoro-nucleotide"
  modified_base 15..15: /mod_base="OTHER" /note="2'-OMe-nucleotide"
  modified_base 16..16: /mod_base="OTHER" /note="2'-fluoro-nucleotide"
  modified_base 17..17: /mod_base="OTHER" /note="2'-OMe-nucleotide"
  modified_base 18..18: /mod_base="OTHER" /note="2'-fluoro-nucleotide"
  modified_base 19..19: /mod_base="OTHER" /note="2'-OMe-nucleotide"
  modified_base 20..20: /mod_base="OTHER" /note="2'-fluoro-nucleotide"
  modified_base 21..21: /mod_base="OTHER" /note="2'-OMe-nucleotide"
  modified_base 22..22: /mod_base="OTHER" /note="2'-fluoro-nucleotide"
  modified_base 23..23: /mod_base="OTHER" /note="Inverted nucleotide"
ccauuuugugaugugggaaucat

SEQ ID NO: 500 - DNA, 23 bp, Artificial Sequence
  Description of Artificial Sequence: Synthetic oligonucleotide
  Description of Combined DNA/RNA Molecule: Synthetic oligonucleotide
  N-term hydroxyl group
  C-term hydroxyl group
  modified_base 1..1: /mod_base="OTHER" /note="2'-OMe-nucleotide"
  modified_base 2..2: /mod_base="OTHER" /note="2'-OMe-nucleotide"
  modified_base 3..3: /mod_base="OTHER" /note="2'-OMe-nucleotide"
  modified_base 4..4: /mod_base="OTHER" /note="2'-fluoro-nucleotide"
  modified_base 5..5: /mod_base="OTHER" /note="2'-OMe-nucleotide"
  modified_base 6..6: /mod_base="OTHER" /note="2'-fluoro-nucleotide"
  modified_base 7..7: /mod_base="OTHER" /note="2'-OMe-nucleotide"
  modified_base 8..8: /mod_base="OTHER" /note="2'-fluoro-nucleotide"
  modified_base 9..9: /mod_base="OTHER" /note="2'-OMe-nucleotide"
  modified_base 10..10: /mod_base="OTHER" /note="2'-fluoro-nucleotide"
  modified_base 11..11: /mod_base="OTHER" /note="2'-OMe-nucleotide"
  modified_base 12..12: /mod_base="OTHER" /note="2'-fluoro-nucleotide"
  modified_base 13..13: /mod_base="OTHER" /note="2'-OMe-nucleotide"
  modified_base 14..14: /mod_base="OTHER" /note="2'-fluoro-nucleotide"
  modified_base 15..15: /mod_base="OTHER" /note="2'-OMe-nucleotide"
  modified_base 16..16: /mod_base="OTHER" /note="2'-fluoro-nucleotide"
  modified_base 17..17: /mod_base="OTHER" /note="2'-OMe-nucleotide"
  modified_base 18..18: /mod_base="OTHER" /note="2'-fluoro-nucleotide"
  modified_base 19..19: /mod_base="OTHER" /note="2'-OMe-nucleotide"
  modified_base 20..20: /mod_base="OTHER" /note="2'-fluoro-nucleotide"
  modified_base 21..21: /mod_base="OTHER" /note="2'-OMe-nucleotide"
  modified_base 22..22: /mod_base="OTHER" /note="2'-fluoro-nucleotide"
  modified_base 23..23: /mod_base="OTHER" /note="Inverted nucleotide"
ccauuugugaugugggaaucaat

SEQ ID NO: 501 - DNA, 23 bp, Artificial Sequence
  Description of Artificial Sequence: Synthetic oligonucleotide
  Description of Combined DNA/RNA Molecule: Synthetic oligonucleotide
  N-term hydroxyl group
  C-term hydroxyl group
  modified_base 1..1: /mod_base="OTHER" /note="2'-OMe-nucleotide"
  modified_base 2..2: /mod_base="OTHER" /note="2'-OMe-nucleotide"
  modified_base 3..3: /mod_base="OTHER" /note="2'-OMe-nucleotide"
  modified_base 4..4: /mod_base="OTHER" /note="2'-fluoro-nucleotide"
  modified_base 5..5: /mod_base="OTHER" /note="2'-OMe-nucleotide"
  modified_base 6..6: /mod_base="OTHER" /note="2'-fluoro-nucleotide"
  modified_base 7..7: /mod_base="OTHER" /note="2'-OMe-nucleotide"
  modified_base 8..8: /mod_base="OTHER" /note="2'-fluoro-nucleotide"
  modified_base 9..9: /mod_base="OTHER" /note="2'-OMe-nucleotide"
  modified_base 10..10: /mod_base="OTHER" /note="2'-fluoro-nucleotide"
  modified_base 11..11: /mod_base="OTHER" /note="2'-OMe-nucleotide"
  modified_base 12..12: /mod_base="OTHER" /note="2'-fluoro-nucleotide"
  modified_base 13..13: /mod_base="OTHER" /note="2'-OMe-nucleotide"
  modified_base 14..14: /mod_base="OTHER" /note="2'-fluoro-nucleotide"
  modified_base 15..15: /mod_base="OTHER" /note="2'-OMe-nucleotide"
  modified_base 16..16: /mod_base="OTHER" /note="2'-fluoro-nucleotide"
  modified_base 17..17: /mod_base="OTHER" /note="2'-OMe-nucleotide"
  modified_base 18..18: /mod_base="OTHER" /note="2'-fluoro-nucleotide"
  modified_base 19..19: /mod_base="OTHER" /note="2'-OMe-nucleotide"
  modified_base 20..20: /mod_base="OTHER" /note="2'-fluoro-nucleotide"
  modified_base 21..21: /mod_base="OTHER" /note="2'-OMe-nucleotide"
  modified_base 22..22: /mod_base="OTHER" /note="2'-fluoro-nucleotide"
  modified_base 23..23: /mod_base="OTHER" /note="Inverted nucleotide"
ccauugugaugugggaaucaaut

SEQ ID NO: 502 - DNA, 23 bp, Artificial Sequence
  Description of Artificial Sequence: Synthetic oligonucleotide
  Description of Combined DNA/RNA Molecule: Synthetic oligonucleotide
  N-term hydroxyl group
  C-term hydroxyl group
  modified_base 1..1: /mod_base="OTHER" /note="2'-OMe-nucleotide"
  modified_base 2..2: /mod_base="OTHER" /note="2'-OMe-nucleotide"
  modified_base 3..3: /mod_base="OTHER" /note="2'-OMe-nucleotide"
  modified_base 4..4: /mod_base="OTHER" /note="2'-fluoro-nucleotide"
  modified_base 5..5: /mod_base="OTHER" /note="2'-OMe-nucleotide"
  modified_base 6..6: /mod_base="OTHER" /note="2'-fluoro-nucleotide"
  modified_base 7..7: /mod_base="OTHER" /note="2'-OMe-nucleotide"
  modified_base 8..8: /mod_base="OTHER" /note="2'-fluoro-nucleotide"
  modified_base 9..9: /mod_base="OTHER" /note="2'-OMe-nucleotide"
  modified_base 10..10: /mod_base="OTHER" /note="2'-fluoro-nucleotide"
  modified_base 11..11: /mod_base="OTHER" /note="2'-OMe-nucleotide"
  modified_base 12..12: /mod_base="OTHER" /note="2'-fluoro-nucleotide"
  modified_base 13..13: /mod_base="OTHER" /note="2'-OMe-nucleotide"
  modified_base 14..14: /mod_base="OTHER" /note="2'-fluoro-nucleotide"
  modified_base 15..15: /mod_base="OTHER" /note="2'-OMe-nucleotide"
  modified_base 16..16: /mod_base="OTHER" /note="2'-fluoro-nucleotide"
  modified_base 17..17: /mod_base="OTHER" /note="2'-OMe-nucleotide"
  modified_base 18..18: /mod_base="OTHER" /note="2'-fluoro-nucleotide"
  modified_base 19..19: /mod_base="OTHER" /note="2'-OMe-nucleotide"
  modified_base 20..20: /mod_base="OTHER" /note="2'-fluoro-nucleotide"
  modified_base 21..21: /mod_base="OTHER" /note="2'-OMe-nucleotide"
  modified_base 22..22: /mod_base="OTHER" /note="2'-fluoro-nucleotide"
  modified_base 23..23: /mod_base="OTHER" /note="Inverted nucleotide"
ccaugugaugugggaaucaauut

SEQ ID NO: 503 - DNA, 23 bp, Artificial Sequence
  Description of Artificial Sequence: Synthetic oligonucleotide
  Description of Combined DNA/RNA Molecule: Synthetic oligonucleotide
  N-term hydroxyl group
  C-term hydroxyl group
  modified_base 1..1: /mod_base="OTHER" /note="2'-OMe-nucleotide"
  modified_base 2..2: /mod_base="OTHER" /note="2'-OMe-nucleotide"
  modified_base 3..3: /mod_base="OTHER" /note="2'-OMe-nucleotide"
  modified_base 4..4: /mod_base="OTHER" /note="2'-fluoro-nucleotide"
  modified_base 5..5: /mod_base="OTHER" /note="2'-OMe-nucleotide"
  modified_base 6..6: /mod_base="OTHER" /note="2'-fluoro-nucleotide"
  modified_base 7..7: /mod_base="OTHER" /note="2'-OMe-nucleotide"
  modified_base 8..8: /mod_base="OTHER" /note="2'-fluoro-nucleotide"
  modified_base 9..9: /mod_base="OTHER" /note="2'-OMe-nucleotide"
  modified_base 10..10: /mod_base="OTHER" /note="2'-fluoro-nucleotide"
  modified_base 11..11: /mod_base="OTHER" /note="2'-OMe-nucleotide"
  modified_base 12..12: /mod_base="OTHER" /note="2'-fluoro-nucleotide"
  modified_base 13..13: /mod_base="OTHER" /note="2'-OMe-nucleotide"
  modified_base 14..14: /mod_base="OTHER" /note="2'-fluoro-nucleotide"
  modified_base 15..15: /mod_base="OTHER" /note="2'-OMe-nucleotide"
  modified_base 16..16: /mod_base="OTHER" /note="2'-fluoro-nucleotide"
  modified_base 17..17: /mod_base="OTHER" /note="2'-OMe-nucleotide"
  modified_base 18..18: /mod_base="OTHER" /note="2'-fluoro-nucleotide"
  modified_base 19..19: /mod_base="OTHER" /note="2'-OMe-nucleotide"
  modified_base 20..20: /mod_base="OTHER" /note="2'-fluoro-nucleotide"
  modified_base 21..21: /mod_base="OTHER" /note="2'-OMe-nucleotide"
  modified_base 22..22: /mod_base="OTHER" /note="2'-fluoro-nucleotide"
  modified_base 23..23: /mod_base="OTHER" /note="Inverted nucleotide"
ccagugaugugggaaucaauuut

SEQ ID NO: 504 - DNA, 23 bp, Artificial Sequence
  Description of Artificial Sequence: Synthetic oligonucleotide
  Description of Combined DNA/RNA Molecule: Synthetic oligonucleotide
  N-term hydroxyl group
  C-term hydroxyl group
  modified_base 1..1: /mod_base="OTHER" /note="2'-OMe-nucleotide"
  modified_base 2..2: /mod_base="OTHER" /note="2'-OMe-nucleotide"
  modified_base 3..3: /mod_base="OTHER" /note="2'-OMe-nucleotide"
  modified_base 4..4: /mod_base="OTHER" /note="2'-fluoro-nucleotide"
  modified_base 5..5: /mod_base="OTHER" /note="2'-OMe-nucleotide"
  modified_base 6..6: /mod_base="OTHER" /note="2'-fluoro-nucleotide"
  modified_base 7..7: /mod_base="OTHER" /note="2'-OMe-nucleotide"
  modified_base 8..8: /mod_base="OTHER" /note="2'-fluoro-nucleotide"
  modified_base 9..9: /mod_base="OTHER" /note="2'-OMe-nucleotide"
  modified_base 10..10: /mod_base="OTHER" /note="2'-fluoro-nucleotide"
  modified_base 11..11: /mod_base="OTHER" /note="2'-OMe-nucleotide"
  modified_base 12..12: /mod_base="OTHER" /note="2'-fluoro-nucleotide"
  modified_base 13..13: /mod_base="OTHER" /note="2'-OMe-nucleotide"
  modified_base 14..14: /mod_base="OTHER" /note="2'-fluoro-nucleotide"
  modified_base 15..15: /mod_base="OTHER" /note="2'-OMe-nucleotide"
  modified_base 16..16: /mod_base="OTHER" /note="2'-fluoro-nucleotide"
  modified_base 17..17: /mod_base="OTHER" /note="2'-OMe-nucleotide"
  modified_base 18..18: /mod_base="OTHER" /note="2'-fluoro-nucleotide"
  modified_base 19..19: /mod_base="OTHER" /note="2'-OMe-nucleotide"
  modified_base 20..20: /mod_base="OTHER" /note="2'-fluoro-nucleotide"
  modified_base 21..21: /mod_base="OTHER" /note="2'-OMe-nucleotide"
  modified_base 22..22: /mod_base="OTHER" /note="2'-fluoro-nucleotide"
  modified_base 23..23: /mod_base="OTHER" /note="Inverted nucleotide"
ccaugaugugggaaucaauuuut

SEQ ID NO: 505 - DNA, 23 bp, Artificial Sequence
  Description of Artificial Sequence: Synthetic oligonucleotide
  Description of Combined DNA/RNA Molecule: Synthetic oligonucleotide
  N-term hydroxyl group
  C-term hydroxyl group
  modified_base 1..1: /mod_base="OTHER" /note="2'-OMe-nucleotide"
  modified_base 2..2: /mod_base="OTHER" /note="2'-OMe-nucleotide"
  modified_base 3..3: /mod_base="OTHER" /note="2'-OMe-nucleotide"
  modified_base 4..4: /mod_base="OTHER" /note="2'-fluoro-nucleotide"
  modified_base 5..5: /mod_base="OTHER" /note="2'-OMe-nucleotide"
  modified_base 6..6: /mod_base="OTHER" /note="2'-fluoro-nucleotide"
  modified_base 7..7: /mod_base="OTHER" /note="2'-OMe-nucleotide"
  modified_base 8..8: /mod_base="OTHER" /note="2'-fluoro-nucleotide"
  modified_base 9..9: /mod_base="OTHER" /note="2'-OMe-nucleotide"
  modified_base 10..10: /mod_base="OTHER" /note="2'-fluoro-nucleotide"
  modified_base 11..11: /mod_base="OTHER" /note="2'-OMe-nucleotide"
  modified_base 12..12: /mod_base="OTHER" /note="2'-fluoro-nucleotide"
  modified_base 13..13: /mod_base="OTHER" /note="2'-OMe-nucleotide"
  modified_base 14..14: /mod_base="OTHER" /note="2'-fluoro-nucleotide"
  modified_base 15..15: /mod_base="OTHER" /note="2'-OMe-nucleotide"
  modified_base 16..16: /mod_base="OTHER" /note="2'-fluoro-nucleotide"
  modified_base 17..17: /mod_base="OTHER" /note="2'-OMe-nucleotide"
  modified_base 18..18: /mod_base="OTHER" /note="2'-fluoro-nucleotide"
  modified_base 19..19: /mod_base="OTHER" /note="2'-OMe-nucleotide"
  modified_base 20..20: /mod_base="OTHER" /note="2'-fluoro-nucleotide"
  modified_base 21..21: /mod_base="OTHER" /note="2'-OMe-nucleotide"
  modified_base 22..22: /mod_base="OTHER" /note="2'-fluoro-nucleotide"
  modified_base 23..23: /mod_base="OTHER" /note="Inverted nucleotide"
ccagaugugggaaucaauuuuat

SEQ ID NO: 506 - DNA, 23 bp, Artificial Sequence
  Description of Artificial Sequence: Synthetic oligonucleotide
  Description of Combined DNA/RNA Molecule: Synthetic oligonucleotide
  N-term hydroxyl group
  C-term hydroxyl group
  modified_base 1..1: /mod_base="OTHER" /note="2'-OMe-nucleotide"
  modified_base 2..2: /mod_base="OTHER" /note="2'-OMe-nucleotide"
  modified_base 3..3: /mod_base="OTHER" /note="2'-OMe-nucleotide"
  modified_base 4..4: /mod_base="OTHER" /note="2'-fluoro-nucleotide"
  modified_base 5..5: /mod_base="OTHER" /note="2'-OMe-nucleotide"
  modified_base 6..6: /mod_base="OTHER" /note="2'-fluoro-nucleotide"
  modified_base 7..7: /mod_base="OTHER" /note="2'-OMe-nucleotide"
  modified_base 8..8: /mod_base="OTHER" /note="2'-fluoro-nucleotide"
  modified_base 9..9: /mod_base="OTHER" /note="2'-OMe-nucleotide"
  modified_base 10..10: /mod_base="OTHER" /note="2'-fluoro-nucleotide"
  modified_base 11..11: /mod_base="OTHER" /note="2'-OMe-nucleotide"
  modified_base 12..12: /mod_base="OTHER" /note="2'-fluoro-nucleotide"
  modified_base 13..13: /mod_base="OTHER" /note="2'-OMe-nucleotide"
  modified_base 14..14: /mod_base="OTHER" /note="2'-fluoro-nucleotide"
  modified_base 15..15: /mod_base="OTHER" /note="2'-OMe-nucleotide"
  modified_base 16..16: /mod_base="OTHER" /note="2'-fluoro-nucleotide"
  modified_base 17..17: /mod_base="OTHER" /note="2'-OMe-nucleotide"
  modified_base 18..18: /mod_base="OTHER" /note="2'-fluoro-nucleotide"
  modified_base 19..19: /mod_base="OTHER" /note="2'-OMe-nucleotide"
  modified_base 20..20: /mod_base="OTHER" /note="2'-fluoro-nucleotide"
  modified_base 21..21: /mod_base="OTHER" /note="2'-OMe-nucleotide"
  modified_base 22..22: /mod_base="OTHER" /note="2'-fluoro-nucleotide"
  modified_base 23..23: /mod_base="OTHER" /note="Inverted nucleotide"
ccaaugugggaaucaauuuuagt

SEQ ID NO: 507 - DNA, 23 bp, Artificial Sequence
  Description of Artificial Sequence: Synthetic oligonucleotide
  Description of Combined DNA/RNA Molecule: Synthetic oligonucleotide
  N-term hydroxyl group
  C-term hydroxyl group
  modified_base 1..1: /mod_base="OTHER" /note="2'-OMe-nucleotide"
  modified_base 2..2: /mod_base="OTHER" /note="2'-OMe-nucleotide"
  modified_base 3..3: /mod_base="OTHER" /note="2'-OMe-nucleotide"
  modified_base 4..4: /mod_base="OTHER" /note="2'-fluoro-nucleotide"
  modified_base 5..5: /mod_base="OTHER" /note="2'-OMe-nucleotide"
  modified_base 6..6: /mod_base="OTHER" /note="2'-fluoro-nucleotide"
  modified_base 7..7: /mod_base="OTHER" /note="2'-OMe-nucleotide"
  modified_base 8..8: /mod_base="OTHER" /note="2'-fluoro-nucleotide"
  modified_base 9..9: /mod_base="OTHER" /note="2'-OMe-nucleotide"
  modified_base 10..10: /mod_base="OTHER" /note="2'-fluoro-nucleotide"
  modified_base 11..11: /mod_base="OTHER" /note="2'-OMe-nucleotide"
  modified_base 12..12: /mod_base="OTHER" /note="2'-fluoro-nucleotide"
  modified_base 13..13: /mod_base="OTHER" /note="2'-OMe-nucleotide"
  modified_base 14..14: /mod_base="OTHER" /note="2'-fluoro-nucleotide"
  modified_base 15..15: /mod_base="OTHER" /note="2'-OMe-nucleotide"
  modified_base 16..16: /mod_base="OTHER" /note="2'-fluoro-nucleotide"
  modified_base 17..17: /mod_base="OTHER" /note="2'-OMe-nucleotide"
  modified_base 18..18: /mod_base="OTHER" /note="2'-fluoro-nucleotide"
  modified_base 19..19: /mod_base="OTHER" /note="2'-OMe-nucleotide"
  modified_base 20..20: /mod_base="OTHER" /note="2'-fluoro-nucleotide"
  modified_base 21..21: /mod_base="OTHER" /note="2'-OMe-nucleotide"
  modified_base 22..22: /mod_base="OTHER" /note="2'-fluoro-nucleotide"
  modified_base 23..23: /mod_base="OTHER" /note="Inverted nucleotide"
ccaugugggaaucaauuuuagat

SEQ ID NO: 508 - DNA, 23 bp, Artificial Sequence
  Description of Artificial Sequence: Synthetic oligonucleotide
  Description of Combined DNA/RNA Molecule: Synthetic oligonucleotide
  N-term hydroxyl group
  C-term hydroxyl group
  modified_base 1..1: /mod_base="OTHER" /note="2'-OMe-nucleotide"
  modified_base 2..2: /mod_base="OTHER" /note="2'-OMe-nucleotide"
  modified_base 3..3: /mod_base="OTHER" /note="2'-OMe-nucleotide"
  modified_base 4..4: /mod_base="OTHER" /note="2'-fluoro-nucleotide"
  modified_base 5..5: /mod_base="OTHER" /note="2'-OMe-nucleotide"
  modified_base 6..6: /mod_base="OTHER" /note="2'-fluoro-nucleotide"
  modified_base 7..7: /mod_base="OTHER" /note="2'-OMe-nucleotide"
  modified_base 8..8: /mod_base="OTHER" /note="2'-fluoro-nucleotide"
  modified_base 9..9: /mod_base="OTHER" /note="2'-OMe-nucleotide"
  modified_base 10..10: /mod_base="OTHER" /note="2'-fluoro-nucleotide"
  modified_base 11..11: /mod_base="OTHER" /note="2'-OMe-nucleotide"
  modified_base 12..12: /mod_base="OTHER" /note="2'-fluoro-nucleotide"
  modified_base 13..13: /mod_base="OTHER" /note="2'-OMe-nucleotide"
  modified_base 14..14: /mod_base="OTHER" /note="2'-fluoro-nucleotide"
  modified_base 15..15: /mod_base="OTHER" /note="2'-OMe-nucleotide"
  modified_base 16..16: /mod_base="OTHER" /note="2'-fluoro-nucleotide"
  modified_base 17..17: /mod_base="OTHER" /note="2'-OMe-nucleotide"
  modified_base 18..18: /mod_base="OTHER" /note="2'-fluoro-nucleotide"
  modified_base 19..19: /mod_base="OTHER" /note="2'-OMe-nucleotide"
  modified_base 20..20: /mod_base="OTHER" /note="2'-fluoro-nucleotide"
  modified_base 21..21: /mod_base="OTHER" /note="2'-OMe-nucleotide"
  modified_base 22..22: /mod_base="OTHER" /note="2'-fluoro-nucleotide"
  modified_base 23..23: /mod_base="OTHER" /note="Inverted nucleotide"
ccagugggaaucaauuuuagaut

SEQ ID NO: 509 - DNA, 23 bp, Artificial Sequence
  Description of Artificial Sequence: Synthetic oligonucleotide
  Description of Combined DNA/RNA Molecule: Synthetic oligonucleotide
  N-term hydroxyl group
  C-term hydroxyl group
  modified_base 1..1: /mod_base="OTHER" /note="2'-OMe-nucleotide"
  modified_base 2..2: /mod_base="OTHER" /note="2'-OMe-nucleotide"
  modified_base 3..3: /mod_base="OTHER" /note="2'-OMe-nucleotide"
  modified_base 4..4: /mod_base="OTHER" /note="2'-fluoro-nucleotide"
  modified_base 5..5: /mod_base="OTHER" /note="2'-OMe-nucleotide"
  modified_base 6..6: /mod_base="OTHER" /note="2'-fluoro-nucleotide"
  modified_base 7..7: /mod_base="OTHER" /note="2'-OMe-nucleotide"
  modified_base 8..8: /mod_base="OTHER" /note="2'-fluoro-nucleotide"
  modified_base 9..9: /mod_base="OTHER" /note="2'-OMe-nucleotide"
  modified_base 10..10: /mod_base="OTHER" /note="2'-fluoro-nucleotide"
  modified_base 11..11: /mod_base="OTHER" /note="2'-OMe-nucleotide"
  modified_base 12..12: /mod_base="OTHER" /note="2'-fluoro-nucleotide"
  modified_base 13..13: /mod_base="OTHER" /note="2'-OMe-nucleotide"
  modified_base 14..14: /mod_base="OTHER" /note="2'-fluoro-nucleotide"
  modified_base 15..15: /mod_base="OTHER" /note="2'-OMe-nucleotide"
  modified_base 16..16: /mod_base="OTHER" /note="2'-fluoro-nucleotide"
  modified_base 17..17: /mod_base="OTHER" /note="2'-OMe-nucleotide"
  modified_base 18..18: /mod_base="OTHER" /note="2'-fluoro-nucleotide"
  modified_base 19..19: /mod_base="OTHER" /note="2'-OMe-nucleotide"
  modified_base 20..20: /mod_base="OTHER" /note="2'-fluoro-nucleotide"
  modified_base 21..21: /mod_base="OTHER" /note="2'-OMe-nucleotide"
  modified_base 22..22: /mod_base="OTHER" /note="2'-fluoro-nucleotide"
  modified_base 23..23: /mod_base="OTHER" /note="Inverted nucleotide"
ccaugggaaucaauuuuagaugt

SEQ ID NO: 510 - DNA, 23 bp, Artificial Sequence
  Description of Artificial Sequence: Synthetic oligonucleotide
  Description of Combined DNA/RNA Molecule: Synthetic oligonucleotide
  N-term hydroxyl group
  C-term hydroxyl group
  modified_base 1..1: /mod_base="OTHER" /note="2'-OMe-nucleotide"
  modified_base 2..2: /mod_base="OTHER" /note="2'-OMe-nucleotide"
  modified_base 3..3: /mod_base="OTHER" /note="2'-OMe-nucleotide"
  modified_base 4..4: /mod_base="OTHER" /note="2'-fluoro-nucleotide"
  modified_base 5..5: /mod_base="OTHER" /note="2'-OMe-nucleotide"
  modified_base 6..6: /mod_base="OTHER" /note="2'-fluoro-nucleotide"
  modified_base 7..7: /mod_base="OTHER" /note="2'-OMe-nucleotide"
  modified_base 8..8: /mod_base="OTHER" /note="2'-fluoro-nucleotide"
  modified_base 9..9: /mod_base="OTHER" /note="2'-OMe-nucleotide"
  modified_base 10..10: /mod_base="OTHER" /note="2'-fluoro-nucleotide"
  modified_base 11..11: /mod_base="OTHER" /note="2'-OMe-nucleotide"
  modified_base 12..12: /mod_base="OTHER" /note="2'-fluoro-nucleotide"
  modified_base 13..13: /mod_base="OTHER" /note="2'-OMe-nucleotide"
  modified_base 14..14: /mod_base="OTHER" /note="2'-fluoro-nucleotide"
  modified_base 15..15: /mod_base="OTHER" /note="2'-OMe-nucleotide"
  modified_base 16..16: /mod_base="OTHER" /note="2'-fluoro-nucleotide"
  modified_base 17..17: /mod_base="OTHER" /note="2'-OMe-nucleotide"
  modified_base 18..18: /mod_base="OTHER" /note="2'-fluoro-nucleotide"
  modified_base 19..19: /mod_base="OTHER" /note="2'-OMe-nucleotide"
  modified_base 20..20: /mod_base="OTHER" /note="2'-fluoro-nucleotide"
  modified_base 21..21: /mod_base="OTHER" /note="2'-OMe-nucleotide"
  modified_base 22..22: /mod_base="OTHER" /note="2'-fluoro-nucleotide"
  modified_base 23..23: /mod_base="OTHER" /note="Inverted nucleotide"
ccagggaaucaauuuuagauggt

SEQ ID NO: 511 - DNA, 23 bp, Artificial Sequence
  Description of Artificial Sequence: Synthetic oligonucleotide
  Description of Combined DNA/RNA Molecule: Synthetic oligonucleotide
  N-term hydroxyl group
  C-term hydroxyl group
  modified_base 1..1: /mod_base="OTHER" /note="2'-OMe-nucleotide"
  modified_base 2..2: /mod_base="OTHER" /note="2'-OMe-nucleotide"
  modified_base 3..3: /mod_base="OTHER" /note="2'-OMe-nucleotide"
  modified_base 4..4: /mod_base="OTHER" /note="2'-fluoro-nucleotide"
  modified_base 5..5: /mod_base="OTHER" /note="2'-OMe-nucleotide"
  modified_base 6..6: /mod_base="OTHER" /note="2'-fluoro-nucleotide"
  modified_base 7..7: /mod_base="OTHER" /note="2'-OMe-nucleotide"
  modified_base 8..8: /mod_base="OTHER" /note="2'-fluoro-nucleotide"
  modified_base 9..9: /mod_base="OTHER" /note="2'-OMe-nucleotide"
  modified_base 10..10: /mod_base="OTHER" /note="2'-fluoro-nucleotide"
  modified_base 11..11: /mod_base="OTHER" /note="2'-OMe-nucleotide"
  modified_base 12..12: /mod_base="OTHER" /note="2'-fluoro-nucleotide"
  modified_base 13..13: /mod_base="OTHER" /note="2'-OMe-nucleotide"
  modified_base 14..14: /mod_base="OTHER" /note="2'-fluoro-nucleotide"
  modified_base 15..15: /mod_base="OTHER" /note="2'-OMe-nucleotide"
  modified_base 16..16: /mod_base="OTHER" /note="2'-fluoro-nucleotide"
  modified_base 17..17: /mod_base="OTHER" /note="2'-OMe-nucleotide"
  modified_base 18..18: /mod_base="OTHER" /note="2'-fluoro-nucleotide"
  modified_base 19..19: /mod_base="OTHER" /note="2'-OMe-nucleotide"
  modified_base 20..20: /mod_base="OTHER" /note="2'-fluoro-nucleotide"
  modified_base 21..21: /mod_base="OTHER" /note="2'-OMe-nucleotide"
  modified_base 22..22: /mod_base="OTHER" /note="2'-fluoro-nucleotide"
  modified_base 23..23: /mod_base="OTHER" /note="Inverted nucleotide"
ccaggaaucaauuuuagauggut

SEQ ID NO: 512 - DNA, 23 bp, Artificial Sequence
  Description of Artificial Sequence: Synthetic oligonucleotide
  Description of Combined DNA/RNA Molecule: Synthetic oligonucleotide
  N-term hydroxyl group
  C-term hydroxyl group
  modified_base 1..1: /mod_base="OTHER" /note="2'-OMe-nucleotide"
  modified_base 2..2: /mod_base="OTHER" /note="2'-OMe-nucleotide"
  modified_base 3..3: /mod_base="OTHER" /note="2'-OMe-nucleotide"
  modified_base 4..4: /mod_base="OTHER" /note="2'-fluoro-nucleotide"
  modified_base 5..5: /mod_base="OTHER" /note="2'-OMe-nucleotide"
  modified_base 6..6: /mod_base="OTHER" /note="2'-fluoro-nucleotide"
  modified_base 7..7: /mod_base="OTHER" /note="2'-OMe-nucleotide"
  modified_base 8..8: /mod_base="OTHER" /note="2'-fluoro-nucleotide"
  modified_base 9..9: /mod_base="OTHER" /note="2'-OMe-nucleotide"
  modified_base 10..10: /mod_base="OTHER" /note="2'-fluoro-nucleotide"
  modified_base 11..11: /mod_base="OTHER" /note="2'-OMe-nucleotide"
  modified_base 12..12: /mod_base="OTHER" /note="2'-fluoro-nucleotide"
  modified_base 13..13: /mod_base="OTHER" /note="2'-OMe-nucleotide"
  modified_base 14..14: /mod_base="OTHER" /note="2'-fluoro-nucleotide"
  modified_base 15..15: /mod_base="OTHER" /note="2'-OMe-nucleotide"
  modified_base 16..16: /mod_base="OTHER" /note="2'-fluoro-nucleotide"
  modified_base 17..17: /mod_base="OTHER" /note="2'-OMe-nucleotide"
  modified_base 18..18: /mod_base="OTHER" /note="2'-fluoro-nucleotide"
  modified_base 19..19: /mod_base="OTHER" /note="2'-OMe-nucleotide"
  modified_base 20..20: /mod_base="OTHER" /note="2'-fluoro-nucleotide"
  modified_base 21..21: /mod_base="OTHER" /note="2'-OMe-nucleotide"
  modified_base 22..22: /mod_base="OTHER" /note="2'-fluoro-nucleotide"
  modified_base 23..23: /mod_base="OTHER" /note="Inverted nucleotide"
ccagaaucaauuuuagaugguct

SEQ ID NO: 513 - DNA, 23 bp, Artificial Sequence
  Description of Artificial Sequence: Synthetic oligonucleotide
  Description of Combined DNA/RNA Molecule: Synthetic oligonucleotide
  N-term hydroxyl group
  C-term hydroxyl group
  modified_base 1..1: /mod_base="OTHER" /note="2'-OMe-nucleotide"
  modified_base 2..2: /mod_base="OTHER" /note="2'-OMe-nucleotide"
  modified_base 3..3: /mod_base="OTHER" /note="2'-OMe-nucleotide"
  modified_base 4..4: /mod_base="OTHER" /note="2'-fluoro-nucleotide"
  modified_base 5..5: /mod_base="OTHER" /note="2'-OMe-nucleotide"
  modified_base 6..6: /mod_base="OTHER" /note="2'-fluoro-nucleotide"
  modified_base 7..7: /mod_base="OTHER" /note="2'-OMe-nucleotide"
  modified_base 8..8: /mod_base="OTHER" /note="2'-fluoro-nucleotide"
  modified_base 9..9: /mod_base="OTHER" /note="2'-OMe-nucleotide"
  modified_base 10..10: /mod_base="OTHER" /note="2'-fluoro-nucleotide"
  modified_base 11..11: /mod_base="OTHER" /note="2'-OMe-nucleotide"
  modified_base 12..12: /mod_base="OTHER" /note="2'-fluoro-nucleotide"
  modified_base 13..13: /mod_base="OTHER" /note="2'-OMe-nucleotide"
  modified_base 14..14: /mod_base="OTHER" /note="2'-fluoro-nucleotide"
  modified_base 15..15: /mod_base="OTHER" /note="2'-OMe-nucleotide"
  modified_base 16..16: /mod_base="OTHER" /note="2'-fluoro-nucleotide"
  modified_base 17..17: /mod_base="OTHER" /note="2'-OMe-nucleotide"
  modified_base 18..18: /mod_base="OTHER" /note="2'-fluoro-nucleotide"
  modified_base 19..19: /mod_base="OTHER" /note="2'-OMe-nucleotide"
  modified_base 20..20: /mod_base="OTHER" /note="2'-fluoro-nucleotide"
  modified_base 21..21: /mod_base="OTHER" /note="2'-OMe-nucleotide"
  modified_base 22..22: /mod_base="OTHER" /note="2'-fluoro-nucleotide"
  modified_base 23..23: /mod_base="OTHER" /note="Inverted nucleotide"
ccacaucauaugagcuaauauct

SEQ ID NO: 514 - DNA, 23 bp, Artificial Sequence
  Description of Artificial Sequence: Synthetic oligonucleotide
  Description of Combined DNA/RNA Molecule: Synthetic oligonucleotide
  N-term hydroxyl group
  C-term hydroxyl group
  modified_base 1..1: /mod_base="OTHER" /note="2'-OMe-nucleotide"
  modified_base 2..2: /mod_base="OTHER" /note="2'-OMe-nucleotide"
  modified_base 3..3: /mod_base="OTHER" /note="2'-OMe-nucleotide"
  modified_base 4..4: /mod_base="OTHER" /note="2'-fluoro-nucleotide"
  modified_base 5..5: /mod_base="OTHER" /note="2'-OMe-nucleotide"
  modified_base 6..6: /mod_base="OTHER" /note="2'-fluoro-nucleotide"
  modified_base 7..7: /mod_base="OTHER" /note="2'-OMe-nucleotide"
  modified_base 8..8: /mod_base="OTHER" /note="2'-fluoro-nucleotide"
  modified_base 9..9: /mod_base="OTHER" /note="2'-OMe-nucleotide"
  modified_base 10..10: /mod_base="OTHER" /note="2'-fluoro-nucleotide"
  modified_base 11..11: /mod_base="OTHER" /note="2'-OMe-nucleotide"
  modified_base 12..12: /mod_base="OTHER" /note="2'-fluoro-nucleotide"
  modified_base 13..13: /mod_base="OTHER" /note="2'-OMe-nucleotide"
  modified_base 14..14: /mod_base="OTHER" /note="2'-fluoro-nucleotide"
  modified_base 15..15: /mod_base="OTHER" /note="2'-OMe-nucleotide"
  modified_base 16..16: /mod_base="OTHER" /note="2'-fluoro-nucleotide"
  modified_base 17..17: /mod_base="OTHER" /note="2'-OMe-nucleotide"
  modified_base 18..18: /mod_base="OTHER" /note="2'-fluoro-nucleotide"
  modified_base 19..19: /mod_base="OTHER" /note="2'-OMe-nucleotide"
  modified_base 20..20: /mod_base="OTHER" /note="2'-fluoro-nucleotide"
  modified_base 21..21: /mod_base="OTHER" /note="2'-OMe-nucleotide"
  modified_base 22..22: /mod_base="OTHER" /note="2'-fluoro-nucleotide"
  modified_base 23..23: /mod_base="OTHER" /note="Inverted nucleotide"
ccaaucauaugagcuaauaucat

SEQ ID NO: 515 - DNA, 23 bp, Artificial Sequence
  Description of Artificial Sequence: Synthetic oligonucleotide
  Description of Combined DNA/RNA Molecule: Synthetic oligonucleotide
  N-term hydroxyl group
  C-term hydroxyl group
  modified_base 1..1: /mod_base="OTHER" /note="2'-OMe-nucleotide"
  modified_base 2..2: /mod_base="OTHER" /note="2'-OMe-nucleotide"
  modified_base 3..3: /mod_base="OTHER" /note="2'-OMe-nucleotide"
  modified_base 4..4: /mod_base="OTHER" /note="2'-fluoro-nucleotide"
  modified_base 5..5: /mod_base="OTHER" /note="2'-OMe-nucleotide"
  modified_base 6..6: /mod_base="OTHER" /note="2'-fluoro-nucleotide"
  modified_base 7..7: /mod_base="OTHER" /note="2'-OMe-nucleotide"
  modified_base 8..8: /mod_base="OTHER" /note="2'-fluoro-nucleotide"
  modified_base 9..9: /mod_base="OTHER" /note="2'-OMe-nucleotide"
  modified_base 10..10: /mod_base="OTHER" /note="2'-fluoro-nucleotide"
  modified_base 11..11: /mod_base="OTHER" /note="2'-OMe-nucleotide"
  modified_base 12..12: /mod_base="OTHER" /note="2'-fluoro-nucleotide"
  modified_base 13..13: /mod_base="OTHER" /note="2'-OMe-nucleotide"
  modified_base 14..14: /mod_base="OTHER" /note="2'-fluoro-nucleotide"
  modified_base 15..15: /mod_base="OTHER" /note="2'-OMe-nucleotide"
  modified_base 16..16: /mod_base="OTHER" /note="2'-fluoro-nucleotide"
  modified_base 17..17: /mod_base="OTHER" /note="2'-OMe-nucleotide"
  modified_base 18..18: /mod_base="OTHER" /note="2'-fluoro-nucleotide"
  modified_base 19..19: /mod_base="OTHER" /note="2'-OMe-nucleotide"
  modified_base 20..20: /mod_base="OTHER" /note="2'-fluoro-nucleotide"
  modified_base 21..21: /mod_base="OTHER" /note="2'-OMe-nucleotide"
  modified_base 22..22: /mod_base="OTHER" /note="2'-fluoro-nucleotide"
  modified_base 23..23: /mod_base="OTHER" /note="Inverted nucleotide"
ccaucauaugagcuaauaucact

SEQ ID NO: 516 - DNA, 23 bp, Artificial Sequence
  Description of Artificial Sequence: Synthetic oligonucleotide
  Description of Combined DNA/RNA Molecule: Synthetic oligonucleotide
  N-term hydroxyl group
  C-term hydroxyl group
  modified_base 1..1: /mod_base="OTHER" /note="2'-OMe-nucleotide"
  modified_base 2..2: /mod_base="OTHER" /note="2'-OMe-nucleotide"
  modified_base 3..3: /mod_base="OTHER" /note="2'-OMe-nucleotide"
  modified_base 4..4: /mod_base="OTHER" /note="2'-fluoro-nucleotide"
  modified_base 5..5: /mod_base="OTHER" /note="2'-OMe-nucleotide"
  modified_base 6..6: /mod_base="OTHER" /note="2'-fluoro-nucleotide"
  modified_base 7..7: /mod_base="OTHER" /note="2'-OMe-nucleotide"
  modified_base 8..8: /mod_base="OTHER" /note="2'-fluoro-nucleotide"
  modified_base 9..9: /mod_base="OTHER" /note="2'-OMe-nucleotide"
  modified_base 10..10: /mod_base="OTHER" /note="2'-fluoro-nucleotide"
  modified_base 11..11: /mod_base="OTHER" /note="2'-OMe-nucleotide"
  modified_base 12..12: /mod_base="OTHER" /note="2'-fluoro-nucleotide"
  modified_base 13..13: /mod_base="OTHER" /note="2'-OMe-nucleotide"
  modified_base 14..14: /mod_base="OTHER" /note="2'-fluoro-nucleotide"
  modified_base 15..15: /mod_base="OTHER" /note="2'-OMe-nucleotide"
  modified_base 16..16: /mod_base="OTHER" /note="2'-fluoro-nucleotide"
  modified_base 17..17: /mod_base="OTHER" /note="2'-OMe-nucleotide"
  modified_base 18..18: /mod_base="OTHER" /note="2'-fluoro-nucleotide"
  modified_base 19..19: /mod_base="OTHER" /note="2'-OMe-nucleotide"
  modified_base 20..20: /mod_base="OTHER" /note="2'-fluoro-nucleotide"
  modified_base 21..21: /mod_base="OTHER" /note="2'-OMe-nucleotide"
  modified_base 22..22: /mod_base="OTHER" /note="2'-fluoro-nucleotide"
  modified_base 23..23: /mod_base="OTHER" /note="Inverted nucleotide"
ccacauaugagcuaauaucacat

SEQ ID NO: 517 - DNA, 23 bp, Artificial Sequence
  Description of Artificial Sequence: Synthetic oligonucleotide
  Description of Combined DNA/RNA Molecule: Synthetic oligonucleotide
  N-term hydroxyl group
  C-term hydroxyl group
  modified_base 1..1: /mod_base="OTHER" /note="2'-OMe-nucleotide"
  modified_base 2..2: /mod_base="OTHER" /note="2'-OMe-nucleotide"
  modified_base 3..3: /mod_base="OTHER" /note="2'-OMe-nucleotide"
  modified_base 4..4: /mod_base="OTHER" /note="2'-fluoro-nucleotide"
  modified_base 5..5: /mod_base="OTHER" /note="2'-OMe-nucleotide"
  modified_base 6..6: /mod_base="OTHER" /note="2'-fluoro-nucleotide"
  modified_base 7..7: /mod_base="OTHER" /note="2'-OMe-nucleotide"
  modified_base 8..8: /mod_base="OTHER" /note="2'-fluoro-nucleotide"
  modified_base 9..9: /mod_base="OTHER" /note="2'-OMe-nucleotide"
  modified_base 10..10: /mod_base="OTHER" /note="2'-fluoro-nucleotide"
  modified_base 11..11: /mod_base="OTHER" /note="2'-OMe-nucleotide"
  modified_base 12..12: /mod_base="OTHER" /note="2'-fluoro-nucleotide"
  modified_base 13..13: /mod_base="OTHER" /note="2'-OMe-nucleotide"
  modified_base 14..14: /mod_base="OTHER" /note="2'-fluoro-nucleotide"
  modified_base 15..15: /mod_base="OTHER" /note="2'-OMe-nucleotide"
  modified_base 16..16: /mod_base="OTHER" /note="2'-fluoro-nucleotide"
  modified_base 17..17: /mod_base="OTHER" /note="2'-OMe-nucleotide"
  modified_base 18..18: /mod_base="OTHER" /note="2'-fluoro-nucleotide"
  modified_base 19..19: /mod_base="OTHER" /note="2'-OMe-nucleotide"
  modified_base 20..20: /mod_base="OTHER" /note="2'-fluoro-nucleotide"
  modified_base 21..21: /mod_base="OTHER" /note="2'-OMe-nucleotide"
  modified_base 22..22: /mod_base="OTHER" /note="2'-fluoro-nucleotide"
  modified_base 23..23: /mod_base="OTHER" /note="Inverted nucleotide"
ccaauaugagcuaauaucacaat

SEQ ID NO: 518 - DNA, 23 bp, Artificial Sequence
  Description of Artificial Sequence: Synthetic oligonucleotide
  Description of Combined DNA/RNA Molecule: Synthetic oligonucleotide
  N-term hydroxyl group
  C-term hydroxyl group
  modified_base 1..1: /mod_base="OTHER" /note="2'-OMe-nucleotide"
  modified_base 2..2: /mod_base="OTHER" /note="2'-OMe-nucleotide"
  modified_base 3..3: /mod_base="OTHER" /note="2'-OMe-nucleotide"
  modified_base 4..4: /mod_base="OTHER" /note="2'-fluoro-nucleotide"
  modified_base 5..5: /mod_base="OTHER" /note="2'-OMe-nucleotide"
  modified_base 6..6: /mod_base="OTHER" /note="2'-fluoro-nucleotide"
  modified_base 7..7: /mod_base="OTHER" /note="2'-OMe-nucleotide"
  modified_base 8..8: /mod_base="OTHER" /note="2'-fluoro-nucleotide"
  modified_base 9..9: /mod_base="OTHER" /note="2'-OMe-nucleotide"
  modified_base 10..10: /mod_base="OTHER" /note="2'-fluoro-nucleotide"
  modified_base 11..11: /mod_base="OTHER" /note="2'-OMe-nucleotide"
  modified_base 12..12: /mod_base="OTHER" /note="2'-fluoro-nucleotide"
  modified_base 13..13: /mod_base="OTHER" /note="2'-OMe-nucleotide"
  modified_base 14..14: /mod_base="OTHER" /note="2'-fluoro-nucleotide"
  modified_base 15..15: /mod_base="OTHER" /note="2'-OMe-nucleotide"
  modified_base 16..16: /mod_base="OTHER" /note="2'-fluoro-nucleotide"
  modified_base 17..17: /mod_base="OTHER" /note="2'-OMe-nucleotide"
  modified_base 18..18: /mod_base="OTHER" /note="2'-fluoro-nucleotide"
  modified_base 19..19: /mod_base="OTHER" /note="2'-OMe-nucleotide"
  modified_base 20..20: /mod_base="OTHER" /note="2'-fluoro-nucleotide"
  modified_base 21..21: /mod_base="OTHER" /note="2'-OMe-nucleotide"
  modified_base 22..22: /mod_base="OTHER" /note="2'-fluoro-nucleotide"
  modified_base 23..23: /mod_base="OTHER" /note="Inverted nucleotide"
ccacccaguuuaaaaaacuagut

SEQ ID NO: 519 - DNA, 23 bp, Artificial Sequence
  Description of Artificial Sequence: Synthetic oligonucleotide
  Description of Combined DNA/RNA Molecule: Synthetic oligonucleotide
  N-term hydroxyl group
  C-term hydroxyl group
  modified_base 1..1: /mod_base="OTHER" /note="2'-OMe-nucleotide"
  modified_base 2..2: /mod_base="OTHER" /note="2'-OMe-nucleotide"
  modified_base 3..3: /mod_base="OTHER" /note="2'-OMe-nucleotide"
  modified_base 4..4: /mod_base="OTHER" /note="2'-fluoro-nucleotide"
  modified_base 5..5: /mod_base="OTHER" /note="2'-OMe-nucleotide"
  modified_base 6..6: /mod_base="OTHER" /note="2'-fluoro-nucleotide"
  modified_base 7..7: /mod_base="OTHER" /note="2'-OMe-nucleotide"
  modified_base 8..8: /mod_base="OTHER" /note="2'-fluoro-nucleotide"
  modified_base 9..9: /mod_base="OTHER" /note="2'-OMe-nucleotide"
  modified_base 10..10: /mod_base="OTHER" /note="2'-fluoro-nucleotide"
  modified_base 11..11: /mod_base="OTHER" /note="2'-OMe-nucleotide"
  modified_base 12..12: /mod_base="OTHER" /note="2'-fluoro-nucleotide"
  modified_base 13..13: /mod_base="OTHER" /note="2'-OMe-nucleotide"
  modified_base 14..14: /mod_base="OTHER" /note="2'-fluoro-nucleotide"
  modified_base 15..15: /mod_base="OTHER" /note="2'-OMe-nucleotide"
  modified_base 16..16: /mod_base="OTHER" /note="2'-fluoro-nucleotide"
  modified_base 17..17: /mod_base="OTHER" /note="2'-OMe-nucleotide"
  modified_base 18..18: /mod_base="OTHER" /note="2'-fluoro-nucleotide"
  modified_base 19..19: /mod_base="OTHER" /note="2'-OMe-nucleotide"
  modified_base 20..20: /mod_base="OTHER" /note="2'-fluoro-nucleotide"
  modified_base 21..21: /mod_base="OTHER" /note="2'-OMe-nucleotide"
  modified_base 22..22: /mod_base="OTHER" /note="2'-fluoro-nucleotide"
  modified_base 23..23: /mod_base="OTHER" /note="Inverted nucleotide"
ccauaaaacucuaaacuugacut

SEQ ID NO: 520 - DNA, 23 bp, Artificial Sequence
  Description of Artificial Sequence: Synthetic oligonucleotide
  Description of Combined DNA/RNA Molecule: Synthetic oligonucleotide
  N-term hydroxyl group
  C-term hydroxyl group
  modified_base 1..1: /mod_base="OTHER" /note="2'-OMe-nucleotide"
  modified_base 2..2: /mod_base="OTHER" /note="2'-OMe-nucleotide"
  modified_base 3..3: /mod_base="OTHER" /note="2'-OMe-nucleotide"
  modified_base 4..4: /mod_base="OTHER" /note="2'-fluoro-nucleotide"
  modified_base 5..5: /mod_base="OTHER" /note="2'-OMe-nucleotide"
  modified_base 6..6: /mod_base="OTHER" /note="2'-fluoro-nucleotide"
  modified_base 7..7: /mod_base="OTHER" /note="2'-OMe-nucleotide"
  modified_base 8..8: /mod_base="OTHER" /note="2'-fluoro-nucleotide"
  modified_base 9..9: /mod_base="OTHER" /note="2'-OMe-nucleotide"
  modified_base 10..10: /mod_base="OTHER" /note="2'-fluoro-nucleotide"
  modified_base 11..11: /mod_base="OTHER" /note="2'-OMe-nucleotide"
  modified_base 12..12: /mod_base="OTHER" /note="2'-fluoro-nucleotide"
  modified_base 13..13: /mod_base="OTHER" /note="2'-OMe-nucleotide"
  modified_base 14..14: /mod_base="OTHER" /note="2'-fluoro-nucleotide"
  modified_base 15..15: /mod_base="OTHER" /note="2'-OMe-nucleotide"
  modified_base 16..16: /mod_base="OTHER" /note="2'-fluoro-nucleotide"
  modified_base 17..17: /mod_base="OTHER" /note="2'-OMe-nucleotide"
  modified_base 18..18: /mod_base="OTHER" /note="2'-fluoro-nucleotide"
  modified_base 19..19: /mod_base="OTHER" /note="2'-OMe-nucleotide"
  modified_base 20..20: /mod_base="OTHER" /note="2'-fluoro-nucleotide"
  modified_base 21..21: /mod_base="OTHER" /note="2'-OMe-nucleotide"
  modified_base 22..22: /mod_base="OTHER" /note="2'-fluoro-nucleotide"
  modified_base 23..23: /mod_base="OTHER" /note="Inverted nucleotide"
ccaaaaacucuaaacuugacuat

SEQ ID NO: 521 - DNA, 23 bp, Artificial Sequence
  Description of Artificial Sequence: Synthetic oligonucleotide
  Description of Combined DNA/RNA Molecule: Synthetic oligonucleotide
  N-term hydroxyl group
  C-term hydroxyl group
  modified_base 1..1: /mod_base="OTHER" /note="2'-OMe-nucleotide"
  modified_base 2..2: /mod_base="OTHER" /note="2'-OMe-nucleotide"
  modified_base 3..3: /mod_base="OTHER" /note="2'-OMe-nucleotide"
  modified_base 4..4: /mod_base="OTHER" /note="2'-fluoro-nucleotide"
  modified_base 5..5: /mod_base="OTHER" /note="2'-OMe-nucleotide"
  modified_base 6..6: /mod_base="OTHER" /note="2'-fluoro-nucleotide"
  modified_base 7..7: /mod_base="OTHER" /note="2'-OMe-nucleotide"
  modified_base 8..8: /mod_base="OTHER" /note="2'-fluoro-nucleotide"
  modified_base 9..9: /mod_base="OTHER" /note="2'-OMe-nucleotide"
  modified_base 10..10: /mod_base="OTHER" /note="2'-fluoro-nucleotide"
  modified_base 11..11: /mod_base="OTHER" /note="2'-OMe-nucleotide"
  modified_base 12..12: /mod_base="OTHER" /note="2'-fluoro-nucleotide"
  modified_base 13..13: /mod_base="OTHER" /note="2'-OMe-nucleotide"
  modified_base 14..14: /mod_base="OTHER" /note="2'-fluoro-nucleotide"
  modified_base 15..15: /mod_base="OTHER" /note="2'-OMe-nucleotide"
  modified_base 16..16: /mod_base="OTHER" /note="2'-fluoro-nucleotide"
  modified_base 17..17: /mod_base="OTHER" /note="2'-OMe-nucleotide"
  modified_base 18..18: /mod_base="OTHER" /note="2'-fluoro-nucleotide"
  modified_base 19..19: /mod_base="OTHER" /note="2'-OMe-nucleotide"
  modified_base 20..20: /mod_base="OTHER" /note="2'-fluoro-nucleotide"
  modified_base 21..21: /mod_base="OTHER" /note="2'-OMe-nucleotide"
  modified_base 22..22: /mod_base="OTHER" /note="2'-fluoro-nucleotide"
  modified_base 23..23: /mod_base="OTHER" /note="Inverted nucleotide"
ccaaaacucuaaacuugacuaat

SEQ ID NO: 522 - DNA, 23 bp, Artificial Sequence
  Description of Artificial Sequence: Synthetic oligonucleotide
  Description of Combined DNA/RNA Molecule: Synthetic oligonucleotide
  N-term hydroxyl group
  C-term hydroxyl group
  modified_base 1..1: /mod_base="OTHER" /note="2'-OMe-nucleotide"
  modified_base 2..2: /mod_base="OTHER" /note="2'-OMe-nucleotide"
  modified_base 3..3: /mod_base="OTHER" /note="2'-OMe-nucleotide"
  modified_base 4..4: /mod_base="OTHER" /note="2'-fluoro-nucleotide"
  modified_base 5..5: /mod_base="OTHER" /note="2'-OMe-nucleotide"
  modified_base 6..6: /mod_base="OTHER" /note="2'-fluoro-nucleotide"
  modified_base 7..7: /mod_base="OTHER" /note="2'-OMe-nucleotide"
  modified_base 8..8: /mod_base="OTHER" /note="2'-fluoro-nucleotide"
  modified_base 9..9: /mod_base="OTHER" /note="2'-OMe-nucleotide"
  modified_base 10..10: /mod_base="OTHER" /note="2'-fluoro-nucleotide"
  modified_base 11..11: /mod_base="OTHER" /note="2'-OMe-nucleotide"
  modified_base 12..12: /mod_base="OTHER" /note="2'-fluoro-nucleotide"
  modified_base 13..13: /mod_base="OTHER" /note="2'-OMe-nucleotide"
  modified_base 14..14: /mod_base="OTHER" /note="2'-fluoro-nucleotide"
  modified_base 15..15: /mod_base="OTHER" /note="2'-OMe-nucleotide"
  modified_base 16..16: /mod_base="OTHER" /note="2'-fluoro-nucleotide"
  modified_base 17..17: /mod_base="OTHER" /note="2'-OMe-nucleotide"
  modified_base 18..18: /mod_base="OTHER" /note="2'-fluoro-nucleotide"
  modified_base 19..19: /mod_base="OTHER" /note="2'-OMe-nucleotide"
  modified_base 20..20: /mod_base="OTHER" /note="2'-fluoro-nucleotide"
  modified_base 21..21: /mod_base="OTHER" /note="2'-OMe-nucleotide"
  modified_base 22..22: /mod_base="OTHER" /note="2'-fluoro-nucleotide"
  modified_base 23..23: /mod_base="OTHER" /note="Inverted nucleotide"
ccaacucuaaacuugacuaaaut

SEQ ID NO: 523 - DNA, 23 bp, Artificial Sequence
  Description of Artificial Sequence: Synthetic oligonucleotide
  Description of Combined DNA/RNA Molecule: Synthetic oligonucleotide
  N-term hydroxyl group
  C-term hydroxyl group
  modified_base 1..1: /mod_base="OTHER" /note="2'-OMe-nucleotide"
  modified_base 2..2: /mod_base="OTHER" /note="2'-OMe-nucleotide"
  modified_base 3..3: /mod_base="OTHER" /note="2'-OMe-nucleotide"
  modified_base 4..4: /mod_base="OTHER" /note="2'-fluoro-nucleotide"
  modified_base 5..5: /mod_base="OTHER" /note="2'-OMe-nucleotide"
  modified_base 6..6: /mod_base="OTHER" /note="2'-fluoro-nucleotide"
  modified_base 7..7: /mod_base="OTHER" /note="2'-OMe-nucleotide"
  modified_base 8..8: /mod_base="OTHER" /note="2'-fluoro-nucleotide"
  modified_base 9..9: /mod_base="OTHER" /note="2'-OMe-nucleotide"
  modified_base 10..10: /mod_base="OTHER" /note="2'-fluoro-nucleotide"
  modified_base 11..11: /mod_base="OTHER" /note="2'-OMe-nucleotide"
  modified_base 12..12: /mod_base="OTHER" /note="2'-fluoro-nucleotide"
  modified_base 13..13: /mod_base="OTHER" /note="2'-OMe-nucleotide"
  modified_base 14..14: /mod_base="OTHER" /note="2'-fluoro-nucleotide"
  modified_base 15..15: /mod_base="OTHER" /note="2'-OMe-nucleotide"
  modified_base 16..16: /mod_base="OTHER" /note="2'-fluoro-nucleotide"
  modified_base 17..17: /mod_base="OTHER" /note="2'-OMe-nucleotide"
  modified_base 18..18: /mod_base="OTHER" /note="2'-fluoro-nucleotide"
  modified_base 19..19: /mod_base="OTHER" /note="2'-OMe-nucleotide"
  modified_base 20..20: /mod_base="OTHER" /note="2'-fluoro-nucleotide"
  modified_base 21..21: /mod_base="OTHER" /note="2'-OMe-nucleotide"
  modified_base 22..22: /mod_base="OTHER" /note="2'-fluoro-nucleotide"
  modified_base 23..23: /mod_base="OTHER" /note="Inverted nucleotide"
ccacucuaaacuugacuaaauat

SEQ ID NO: 524 - DNA, 23 bp, Artificial Sequence
  Description of Artificial Sequence: Synthetic oligonucleotide
  Description of Combined DNA/RNA Molecule: Synthetic oligonucleotide
  N-term hydroxyl group
  C-term hydroxyl group
  modified_base 1..1: /mod_base="OTHER" /note="2'-OMe-nucleotide"
  modified_base 2..2: /mod_base="OTHER" /note="2'-OMe-nucleotide"
  modified_base 3..3: /mod_base="OTHER" /note="2'-OMe-nucleotide"
  modified_base 4..4: /mod_base="OTHER" /note="2'-fluoro-nucleotide"
  modified_base 5..5: /mod_base="OTHER" /note="2'-OMe-nucleotide"
  modified_base 6..6: /mod_base="OTHER" /note="2'-fluoro-nucleotide"
  modified_base 7..7: /mod_base="OTHER" /note="2'-OMe-nucleotide"
  modified_base 8..8: /mod_base="OTHER" /note="2'-fluoro-nucleotide"
  modified_base 9..9: /mod_base="OTHER" /note="2'-OMe-nucleotide"
  modified_base 10..10: /mod_base="OTHER" /note="2'-fluoro-nucleotide"
  modified_base 11..11: /mod_base="OTHER" /note="2'-OMe-nucleotide"
  modified_base 12..12: /mod_base="OTHER" /note="2'-fluoro-nucleotide"
  modified_base 13..13: /mod_base="OTHER" /note="2'-OMe-nucleotide"
  modified_base 14..14: /mod_base="OTHER" /note="2'-fluoro-nucleotide"
  modified_base 15..15: /mod_base="OTHER" /note="2'-OMe-nucleotide"
  modified_base 16..16: /mod_base="OTHER" /note="2'-fluoro-nucleotide"
  modified_base 17..17: /mod_base="OTHER" /note="2'-OMe-nucleotide"
  modified_base 18..18: /mod_base="OTHER" /note="2'-fluoro-nucleotide"
  modified_base 19..19: /mod_base="OTHER" /note="2'-OMe-nucleotide"
  modified_base 20..20: /mod_base="OTHER" /note="2'-fluoro-nucleotide"
  modified_base 21..21: /mod_base="OTHER" /note="2'-OMe-nucleotide"
  modified_base 22..22: /mod_base="OTHER" /note="2'-fluoro-nucleotide"
  modified_base 23..23: /mod_base="OTHER" /note="Inverted nucleotide"
ccagucagcacagaguaugugut

SEQ ID NO: 525 - DNA, 23 bp, Artificial Sequence
  Description of Artificial Sequence: Synthetic oligonucleotide
  Description of Combined DNA/RNA Molecule: Synthetic oligonucleotide
  N-term hydroxyl group
  C-term hydroxyl group
  modified_base 1..1: /mod_base="OTHER" /note="2'-OMe-nucleotide"
  modified_base 2..2: /mod_base="OTHER" /note="2'-OMe-nucleotide"
  modified_base 3..3: /mod_base="OTHER" /note="2'-OMe-nucleotide"
  modified_base 4..4: /mod_base="OTHER" /note="2'-fluoro-nucleotide"
  modified_base 5..5: /mod_base="OTHER" /note="2'-OMe-nucleotide"
  modified_base 6..6: /mod_base="OTHER" /note="2'-fluoro-nucleotide"
  modified_base 7..7: /mod_base="OTHER" /note="2'-OMe-nucleotide"
  modified_base 8..8: /mod_base="OTHER" /note="2'-fluoro-nucleotide"
  modified_base 9..9: /mod_base="OTHER" /note="2'-OMe-nucleotide"
  modified_base 10..10: /mod_base="OTHER" /note="2'-fluoro-nucleotide"
  modified_base 11..11: /mod_base="OTHER" /note="2'-OMe-nucleotide"
  modified_base 12..12: /mod_base="OTHER" /note="2'-fluoro-nucleotide"
  modified_base 13..13: /mod_base="OTHER" /note="2'-OMe-nucleotide"
  modified_base 14..14: /mod_base="OTHER" /note="2'-fluoro-nucleotide"
  modified_base 15..15: /mod_base="OTHER" /note="2'-OMe-nucleotide"
  modified_base 16..16: /mod_base="OTHER" /note="2'-fluoro-nucleotide"
  modified_base 17..17: /mod_base="OTHER" /note="2'-OMe-nucleotide"
  modified_base 18..18: /mod_base="OTHER" /note="2'-fluoro-nucleotide"
  modified_base 19..19: /mod_base="OTHER" /note="2'-OMe-nucleotide"
  modified_base 20..20: /mod_base="OTHER" /note="2'-fluoro-nucleotide"
  modified_base 21..21: /mod_base="OTHER" /note="2'-OMe-nucleotide"
  modified_base 22..22: /mod_base="OTHER" /note="2'-fluoro-nucleotide"
  modified_base 23..23: /mod_base="OTHER" /note="Inverted nucleotide"
ccagauuuauuuaugaaaccuat

SEQ ID NO: 526 - DNA, 23 bp, Artificial Sequence
  Description of Artificial Sequence: Synthetic oligonucleotide
  Description of Combined DNA/RNA Molecule: Synthetic oligonucleotide
  N-term hydroxyl group
  C-term hydroxyl group
  modified_base 1..1: /mod_base="OTHER" /note="2'-OMe-nucleotide"
  modified_base 2..2: /mod_base="OTHER" /note="2'-OMe-nucleotide"
  modified_base 3..3: /mod_base="OTHER" /note="2'-OMe-nucleotide"
  modified_base 4..4: /mod_base="OTHER" /note="2'-fluoro-nucleotide"
  modified_base 5..5: /mod_base="OTHER" /note="2'-OMe-nucleotide"
  modified_base 6..6: /mod_base="OTHER" /note="2'-fluoro-nucleotide"
  modified_base 7..7: /mod_base="OTHER" /note="2'-OMe-nucleotide"
  modified_base 8..8: /mod_base="OTHER" /note="2'-fluoro-nucleotide"
  modified_base 9..9: /mod_base="OTHER" /note="2'-OMe-nucleotide"
  modified_base 10..10: /mod_base="OTHER" /note="2'-fluoro-nucleotide"
  modified_base 11..11: /mod_base="OTHER" /note="2'-OMe-nucleotide"
  modified_base 12..12: /mod_base="OTHER" /note="2'-fluoro-nucleotide"
  modified_base 13..13: /mod_base="OTHER" /note="2'-OMe-nucleotide"
  modified_base 14..14: /mod_base="OTHER" /note="2'-fluoro-nucleotide"
  modified_base 15..15: /mod_base="OTHER" /note="2'-OMe-nucleotide"
  modified_base 16..16: /mod_base="OTHER" /note="2'-fluoro-nucleotide"
  modified_base 17..17: /mod_base="OTHER" /note="2'-OMe-nucleotide"
  modified_base 18..18: /mod_base="OTHER" /note="2'-fluoro-nucleotide"
  modified_base 19..19: /mod_base="OTHER" /note="2'-OMe-nucleotide"
  modified_base 20..20: /mod_base="OTHER" /note="2'-fluoro-nucleotide"
  modified_base 21..21: /mod_base="OTHER" /note="2'-OMe-nucleotide"
  modified_base 22..22: /mod_base="OTHER" /note="2'-fluoro-nucleotide"
  modified_base 23..23: /mod_base="OTHER" /note="Inverted nucleotide"
ccaauuuaugaaaccuaaugaat

SEQ ID NO: 527 - DNA, 23 bp, Artificial Sequence
  Description of Artificial Sequence: Synthetic oligonucleotide
  Description of Combined DNA/RNA Molecule: Synthetic oligonucleotide
  N-term hydroxyl group
  C-term hydroxyl group
  modified_base 1..1: /mod_base="OTHER" /note="2'-OMe-nucleotide"
  modified_base 2..2: /mod_base="OTHER" /note="2'-OMe-nucleotide"
  modified_base 3..3: /mod_base="OTHER" /note="2'-OMe-nucleotide"
  modified_base 4..4: /mod_base="OTHER" /note="2'-fluoro-nucleotide"
  modified_base 5..5: /mod_base="OTHER" /note="2'-OMe-nucleotide"
  modified_base 6..6: /mod_base="OTHER" /note="2'-fluoro-nucleotide"
  modified_base 7..7: /mod_base="OTHER" /note="2'-OMe-nucleotide"
  modified_base 8..8: /mod_base="OTHER" /note="2'-fluoro-nucleotide"
  modified_base 9..9: /mod_base="OTHER" /note="2'-OMe-nucleotide"
  modified_base 10..10: /mod_base="OTHER" /note="2'-fluoro-nucleotide"
  modified_base 11..11: /mod_base="OTHER" /note="2'-OMe-nucleotide"
  modified_base 12..12: /mod_base="OTHER" /note="2'-fluoro-nucleotide"
  modified_base 13..13: /mod_base="OTHER" /note="2'-OMe-nucleotide"
  modified_base 14..14: /mod_base="OTHER" /note="2'-fluoro-nucleotide"
  modified_base 15..15: /mod_base="OTHER" /note="2'-OMe-nucleotide"
  modified_base 16..16: /mod_base="OTHER" /note="2'-fluoro-nucleotide"
  modified_base 17..17: /mod_base="OTHER" /note="2'-OMe-nucleotide"
  modified_base 18..18: /mod_base="OTHER" /note="2'-fluoro-nucleotide"
  modified_base 19..19: /mod_base="OTHER" /note="2'-OMe-nucleotide"
  modified_base 20..20: /mod_base="OTHER" /note="2'-fluoro-nucleotide"
  modified_base 21..21: /mod_base="OTHER" /note="2'-OMe-nucleotide"
  modified_base 22..22: /mod_base="OTHER" /note="2'-fluoro-nucleotide"
  modified_base 23..23: /mod_base="OTHER" /note="Inverted nucleotide"
ccauuuaugaaaccuaaugaagt

SEQ ID NO: 528 - DNA, 23 bp, Artificial Sequence
  Description of Artificial Sequence: Synthetic oligonucleotide
  Description of Combined DNA/RNA Molecule: Synthetic oligonucleotide
  N-term hydroxyl group
  C-term hydroxyl group
  modified_base 1..1: /mod_base="OTHER" /note="2'-OMe-nucleotide"
  modified_base 2..2: /mod_base="OTHER" /note="2'-OMe-nucleotide"
  modified_base 3..3: /mod_base="OTHER" /note="2'-OMe-nucleotide"
  modified_base 4..4: /mod_base="OTHER" /note="2'-fluoro-nucleotide"
  modified_base 5..5: /mod_base="OTHER" /note="2'-OMe-nucleotide"
  modified_base 6..6: /mod_base="OTHER" /note="2'-fluoro-nucleotide"
  modified_base 7..7: /mod_base="OTHER" /note="2'-OMe-nucleotide"
  modified_base 8..8: /mod_base="OTHER" /note="2'-fluoro-nucleotide"
  modified_base 9..9: /mod_base="OTHER" /note="2'-OMe-nucleotide"
  modified_base 10..10: /mod_base="OTHER" /note="2'-fluoro-nucleotide"
  modified_base 11..11: /mod_base="OTHER" /note="2'-OMe-nucleotide"
  modified_base 12..12: /mod_base="OTHER" /note="2'-fluoro-nucleotide"
  modified_base 13..13: /mod_base="OTHER" /note="2'-OMe-nucleotide"
  modified_base 14..14: /mod_base="OTHER" /note="2'-fluoro-nucleotide"
  modified_base 15..15: /mod_base="OTHER" /note="2'-OMe-nucleotide"
  modified_base 16..16: /mod_base="OTHER" /note="2'-fluoro-nucleotide"
  modified_base 17..17: /mod_base="OTHER" /note="2'-OMe-nucleotide"
  modified_base 18..18: /mod_base="OTHER" /note="2'-fluoro-nucleotide"
  modified_base 19..19: /mod_base="OTHER" /note="2'-OMe-nucleotide"
  modified_base 20..20: /mod_base="OTHER" /note="2'-fluoro-nucleotide"
  modified_base 21..21: /mod_base="OTHER" /note="2'-OMe-nucleotide"
  modified_base 22..22: /mod_base="OTHER" /note="2'-fluoro-nucleotide"
  modified_base 23..23: /mod_base="OTHER" /note="Inverted nucleotide"
ccauaugaaaccuaaugaagcat

SEQ ID NO: 529 - DNA, 23 bp, Artificial Sequence
  Description of Artificial Sequence: Synthetic oligonucleotide
  Description of Combined DNA/RNA Molecule: Synthetic oligonucleotide
  N-term hydroxyl group
  C-term hydroxyl group
  modified_base 1..1: /mod_base="OTHER" /note="2'-OMe-nucleotide"
  modified_base 2..2: /mod_base="OTHER" /note="2'-OMe-nucleotide"
  modified_base 3..3: /mod_base="OTHER" /note="2'-OMe-nucleotide"
  modified_base 4..4: /mod_base="OTHER" /note="2'-fluoro-nucleotide"
  modified_base 5..5: /mod_base="OTHER" /note="2'-OMe-nucleotide"
  modified_base 6..6: /mod_base="OTHER" /note="2'-fluoro-nucleotide"
  modified_base 7..7: /mod_base="OTHER" /note="2'-OMe-nucleotide"
  modified_base 8..8: /mod_base="OTHER" /note="2'-fluoro-nucleotide"
  modified_base 9..9: /mod_base="OTHER" /note="2'-OMe-nucleotide"
  modified_base 10..10: /mod_base="OTHER" /note="2'-fluoro-nucleotide"
  modified_base 11..11: /mod_base="OTHER" /note="2'-OMe-nucleotide"
  modified_base 12..12: /mod_base="OTHER" /note="2'-fluoro-nucleotide"
  modified_base 13..13: /mod_base="OTHER" /note="2'-OMe-nucleotide"
  modified_base 14..14: /mod_base="OTHER" /note="2'-fluoro-nucleotide"
  modified_base 15..15: /mod_base="OTHER" /note="2'-OMe-nucleotide"
  modified_base 16..16: /mod_base="OTHER" /note="2'-fluoro-nucleotide"
  modified_base 17..17: /mod_base="OTHER" /note="2'-OMe-nucleotide"
  modified_base 18..18: /mod_base="OTHER" /note="2'-fluoro-nucleotide"
  modified_base 19..19: /mod_base="OTHER" /note="2'-OMe-nucleotide"
  modified_base 20..20: /mod_base="OTHER" /note="2'-fluoro-nucleotide"
  modified_base 21..21: /mod_base="OTHER" /note="2'-OMe-nucleotide"
  modified_base 22..22: /mod_base="OTHER" /note="2'-fluoro-nucleotide"
  modified_base 23..23: /mod_base="OTHER" /note="Inverted nucleotide"
ccaaugaaaccuaaugaagcagt

SEQ ID NO: 530 - DNA, 23 bp, Artificial Sequence
  Description of Artificial Sequence: Synthetic oligonucleotide
  Description of Combined DNA/RNA Molecule: Synthetic oligonucleotide
  N-term hydroxyl group
  C-term hydroxyl group
  modified_base 1..1: /mod_base="OTHER" /note="2'-OMe-nucleotide"
  modified_base 2..2: /mod_base="OTHER" /note="2'-OMe-nucleotide"
  modified_base 3..3: /mod_base="OTHER" /note="2'-OMe-nucleotide"
  modified_base 4..4: /mod_base="OTHER" /note="2'-fluoro-nucleotide"
  modified_base 5..5: /mod_base="OTHER" /note="2'-OMe-nucleotide"
  modified_base 6..6: /mod_base="OTHER" /note="2'-fluoro-nucleotide"
  modified_base 7..7: /mod_base="OTHER" /note="2'-OMe-nucleotide"
  modified_base 8..8: /mod_base="OTHER" /note="2'-fluoro-nucleotide"
  modified_base 9..9: /mod_base="OTHER" /note="2'-OMe-nucleotide"
  modified_base 10..10: /mod_base="OTHER" /note="2'-fluoro-nucleotide"
  modified_base 11..11: /mod_base="OTHER" /note="2'-OMe-nucleotide"
  modified_base 12..12: /mod_base="OTHER" /note="2'-fluoro-nucleotide"
  modified_base 13..13: /mod_base="OTHER" /note="2'-OMe-nucleotide"
  modified_base 14..14: /mod_base="OTHER" /note="2'-fluoro-nucleotide"
  modified_base 15..15: /mod_base="OTHER" /note="2'-OMe-nucleotide"
  modified_base 16..16: /mod_base="OTHER" /note="2'-fluoro-nucleotide"
  modified_base 17..17: /mod_base="OTHER" /note="2'-OMe-nucleotide"
  modified_base 18..18: /mod_base="OTHER" /note="2'-fluoro-nucleotide"
  modified_base 19..19: /mod_base="OTHER" /note="2'-OMe-nucleotide"
  modified_base 20..20: /mod_base="OTHER" /note="2'-fluoro-nucleotide"
  modified_base 21..21: /mod_base="OTHER" /note="2'-OMe-nucleotide"
  modified_base 22..22: /mod_base="OTHER" /note="2'-fluoro-nucleotide"
  modified_base 23..23: /mod_base="OTHER" /note="Inverted nucleotide"
ccauacuaagucacauugacuut

SEQ ID NO: 531 - DNA, 23 bp, Artificial Sequence
  Description of Artificial Sequence: Synthetic oligonucleotide
  Description of Combined DNA/RNA Molecule: Synthetic oligonucleotide
  N-term hydroxyl group
  C-term hydroxyl group
  modified_base 1..1: /mod_base="OTHER" /note="2'-OMe-nucleotide"
  modified_base 2..2: /mod_base="OTHER" /note="2'-OMe-nucleotide"
  modified_base 3..3: /mod_base="OTHER" /note="2'-OMe-nucleotide"
  modified_base 4..4: /mod_base="OTHER" /note="2'-fluoro-nucleotide"
  modified_base 5..5: /mod_base="OTHER" /note="2'-OMe-nucleotide"
  modified_base 6..6: /mod_base="OTHER" /note="2'-fluoro-nucleotide"
  modified_base 7..7: /mod_base="OTHER" /note="2'-OMe-nucleotide"
  modified_base 8..8: /mod_base="OTHER" /note="2'-fluoro-nucleotide"
  modified_base 9..9: /mod_base="OTHER" /note="2'-OMe-nucleotide"
  modified_base 10..10: /mod_base="OTHER" /note="2'-fluoro-nucleotide"
  modified_base 11..11: /mod_base="OTHER" /note="2'-OMe-nucleotide"
  modified_base 12..12: /mod_base="OTHER" /note="2'-fluoro-nucleotide"
  modified_base 13..13: /mod_base="OTHER" /note="2'-OMe-nucleotide"
  modified_base 14..14: /mod_base="OTHER" /note="2'-fluoro-nucleotide"
  modified_base 15..15: /mod_base="OTHER" /note="2'-OMe-nucleotide"
  modified_base 16..16: /mod_base="OTHER" /note="2'-fluoro-nucleotide"
  modified_base 17..17: /mod_base="OTHER" /note="2'-OMe-nucleotide"
  modified_base 18..18: /mod_base="OTHER" /note="2'-fluoro-nucleotide"
  modified_base 19..19: /mod_base="OTHER" /note="2'-OMe-nucleotide"
  modified_base 20..20: /mod_base="OTHER" /note="2'-fluoro-nucleotide"
  modified_base 21..21: /mod_base="OTHER" /note="2'-OMe-nucleotide"
  modified_base 22..22: /mod_base="OTHER" /note="2'-fluoro-nucleotide"
  modified_base 23..23: /mod_base="OTHER" /note="Inverted nucleotide"
ccaacuaagucacauugacuuut

SEQ ID NO: 532 - DNA, 23 bp, Artificial Sequence
  Description of Artificial Sequence: Synthetic oligonucleotide
  Description of Combined DNA/RNA Molecule: Synthetic oligonucleotide
  N-term hydroxyl group
  C-term hydroxyl group
  modified_base 1..1: /mod_base="OTHER" /note="2'-OMe-nucleotide"
  modified_base 2..2: /mod_base="OTHER" /note="2'-OMe-nucleotide"
  modified_base 3..3: /mod_base="OTHER" /note="2'-OMe-nucleotide"
  modified_base 4..4: /mod_base="OTHER" /note="2'-fluoro-nucleotide"
  modified_base 5..5: /mod_base="OTHER" /note="2'-OMe-nucleotide"
  modified_base 6..6: /mod_base="OTHER" /note="2'-fluoro-nucleotide"
  modified_base 7..7: /mod_base="OTHER" /note="2'-OMe-nucleotide"
  modified_base 8..8: /mod_base="OTHER" /note="2'-fluoro-nucleotide"
  modified_base 9..9: /mod_base="OTHER" /note="2'-OMe-nucleotide"
  modified_base 10..10: /mod_base="OTHER" /note="2'-fluoro-nucleotide"
  modified_base 11..11: /mod_base="OTHER" /note="2'-OMe-nucleotide"
  modified_base 12..12: /mod_base="OTHER" /note="2'-fluoro-nucleotide"
  modified_base 13..13: /mod_base="OTHER" /note="2'-OMe-nucleotide"
  modified_base 14..14: /mod_base="OTHER" /note="2'-fluoro-nucleotide"
  modified_base 15..15: /mod_base="OTHER" /note="2'-OMe-nucleotide"
  modified_base 16..16: /mod_base="OTHER" /note="2'-fluoro-nucleotide"
  modified_base 17..17: /mod_base="OTHER" /note="2'-OMe-nucleotide"
  modified_base 18..18: /mod_base="OTHER" /note="2'-fluoro-nucleotide"
  modified_base 19..19: /mod_base="OTHER" /note="2'-OMe-nucleotide"
  modified_base 20..20: /mod_base="OTHER" /note="2'-fluoro-nucleotide"
  modified_base 21..21: /mod_base="OTHER" /note="2'-OMe-nucleotide"
  modified_base 22..22: /mod_base="OTHER" /note="2'-fluoro-nucleotide"
  modified_base 23..23: /mod_base="OTHER" /note="Inverted nucleotide"
ccacuaagucacauugacuuuat

SEQ ID NO: 533 - DNA, 23 bp, Artificial Sequence
  Description of Artificial Sequence: Synthetic oligonucleotide
  Description of Combined DNA/RNA Molecule: Synthetic oligonucleotide
  N-term hydroxyl group
  C-term hydroxyl group
  modified_base 1..1: /mod_base="OTHER" /note="2'-OMe-nucleotide"
  modified_base 2..2: /mod_base="OTHER" /note="2'-OMe-nucleotide"
  modified_base 3..3: /mod_base="OTHER" /note="2'-OMe-nucleotide"
  modified_base 4..4: /mod_base="OTHER" /note="2'-fluoro-nucleotide"
  modified_base 5..5: /mod_base="OTHER" /note="2'-OMe-nucleotide"
  modified_base 6..6: /mod_base="OTHER" /note="2'-fluoro-nucleotide"
  modified_base 7..7: /mod_base="OTHER" /note="2'-OMe-nucleotide"
  modified_base 8..8: /mod_base="OTHER" /note="2'-fluoro-nucleotide"
  modified_base 9..9: /mod_base="OTHER" /note="2'-OMe-nucleotide"
  modified_base 10..10: /mod_base="OTHER" /note="2'-fluoro-nucleotide"
  modified_base 11..11: /mod_base="OTHER" /note="2'-OMe-nucleotide"
  modified_base 12..12: /mod_base="OTHER" /note="2'-fluoro-nucleotide"
  modified_base 13..13: /mod_base="OTHER" /note="2'-OMe-nucleotide"
  modified_base 14..14: /mod_base="OTHER" /note="2'-fluoro-nucleotide"
  modified_base 15..15: /mod_base="OTHER" /note="2'-OMe-nucleotide"
  modified_base 16..16: /mod_base="OTHER" /note="2'-fluoro-nucleotide"
  modified_base 17..17: /mod_base="OTHER" /note="2'-OMe-nucleotide"
  modified_base 18..18: /mod_base="OTHER" /note="2'-fluoro-nucleotide"
  modified_base 19..19: /mod_base="OTHER" /note="2'-OMe-nucleotide"
  modified_base 20..20: /mod_base="OTHER" /note="2'-fluoro-nucleotide"
  modified_base 21..21: /mod_base="OTHER" /note="2'-OMe-nucleotide"
  modified_base 22..22: /mod_base="OTHER" /note="2'-fluoro-nucleotide"
  modified_base 23..23: /mod_base="OTHER" /note="Inverted nucleotide"
ccauaagucacauugacuuuaat

SEQ ID NO: 534 - DNA, 23 bp, Artificial Sequence
  Description of Artificial Sequence: Synthetic oligonucleotide
  Description of Combined DNA/RNA Molecule: Synthetic oligonucleotide
  N-term hydroxyl group
  C-term hydroxyl group
  modified_base 1..1: /mod_base="OTHER" /note="2'-OMe-nucleotide"
  modified_base 2..2: /mod_base="OTHER" /note="2'-OMe-nucleotide"
  modified_base 3..3: /mod_base="OTHER" /note="2'-OMe-nucleotide"
  modified_base 4..4: /mod_base="OTHER" /note="2'-fluoro-nucleotide"
  modified_base 5..5: /mod_base="OTHER" /note="2'-OMe-nucleotide"
  modified_base 6..6: /mod_base="OTHER" /note="2'-fluoro-nucleotide"
  modified_base 7..7: /mod_base="OTHER" /note="2'-OMe-nucleotide"
  modified_base 8..8: /mod_base="OTHER" /note="2'-fluoro-nucleotide"
  modified_base 9..9: /mod_base="OTHER" /note="2'-OMe-nucleotide"
  modified_base 10..10: /mod_base="OTHER" /note="2'-fluoro-nucleotide"
  modified_base 11..11: /mod_base="OTHER" /note="2'-OMe-nucleotide"
  modified_base 12..12: /mod_base="OTHER" /note="2'-fluoro-nucleotide"
  modified_base 13..13: /mod_base="OTHER" /note="2'-OMe-nucleotide"
  modified_base 14..14: /mod_base="OTHER" /note="2'-fluoro-nucleotide"
  modified_base 15..15: /mod_base="OTHER" /note="2'-OMe-nucleotide"
  modified_base 16..16: /mod_base="OTHER" /note="2'-fluoro-nucleotide"
  modified_base 17..17: /mod_base="OTHER" /note="2'-OMe-nucleotide"
  modified_base 18..18: /mod_base="OTHER" /note="2'-fluoro-nucleotide"
  modified_base 19..19: /mod_base="OTHER" /note="2'-OMe-nucleotide"
  modified_base 20..20: /mod_base="OTHER" /note="2'-fluoro-nucleotide"
  modified_base 21..21: /mod_base="OTHER" /note="2'-OMe-nucleotide"
  modified_base 22..22: /mod_base="OTHER" /note="2'-fluoro-nucleotide"
  modified_base 23..23: /mod_base="OTHER" /note="Inverted nucleotide"
ccagagguaucacuauaccuuat

SEQ ID NO: 535 - DNA, 23 bp, Artificial Sequence
  Description of Artificial Sequence: Synthetic oligonucleotide
  Description of Combined DNA/RNA Molecule: Synthetic oligonucleotide
  N-term hydroxyl group
  C-term hydroxyl group
  modified_base 1..1: /mod_base="OTHER" /note="2'-OMe-nucleotide"
  modified_base 2..2: /mod_base="OTHER" /note="2'-OMe-nucleotide"
  modified_base 3..3: /mod_base="OTHER" /note="2'-OMe-nucleotide"
  modified_base 4..4: /mod_base="OTHER" /note="2'-fluoro-nucleotide"
  modified_base 5..5: /mod_base="OTHER" /note="2'-OMe-nucleotide"
  modified_base 6..6: /mod_base="OTHER" /note="2'-fluoro-nucleotide"
  modified_base 7..7: /mod_base="OTHER" /note="2'-OMe-nucleotide"
  modified_base 8..8: /mod_base="OTHER" /note="2'-fluoro-nucleotide"
  modified_base 9..9: /mod_base="OTHER" /note="2'-OMe-nucleotide"
  modified_base 10..10: /mod_base="OTHER" /note="2'-fluoro-nucleotide"
  modified_base 11..11: /mod_base="OTHER" /note="2'-OMe-nucleotide"
  modified_base 12..12: /mod_base="OTHER" /note="2'-fluoro-nucleotide"
  modified_base 13..13: /mod_base="OTHER" /note="2'-OMe-nucleotide"
  modified_base 14..14: /mod_base="OTHER" /note="2'-fluoro-nucleotide"
  modified_base 15..15: /mod_base="OTHER" /note="2'-OMe-nucleotide"
  modified_base 16..16: /mod_base="OTHER" /note="2'-fluoro-nucleotide"
  modified_base 17..17: /mod_base="OTHER" /note="2'-OMe-nucleotide"
  modified_base 18..18: /mod_base="OTHER" /note="2'-fluoro-nucleotide"
  modified_base 19..19: /mod_base="OTHER" /note="2'-OMe-nucleotide"
  modified_base 20..20: /mod_base="OTHER" /note="2'-fluoro-nucleotide"
  modified_base 21..21: /mod_base="OTHER" /note="2'-OMe-nucleotide"
  modified_base 22..22: /mod_base="OTHER" /note="2'-fluoro-nucleotide"
  modified_base 23..23: /mod_base="OTHER" /note="Inverted nucleotide"
ccacuuaauacuaugaaaacaat

SEQ ID NO: 536 - DNA, 23 bp, Artificial Sequence
  Description of Artificial Sequence: Synthetic oligonucleotide
  Description of Combined DNA/RNA Molecule: Synthetic oligonucleotide
  N-term hydroxyl group
  C-term hydroxyl group
  modified_base 1..1: /mod_base="OTHER" /note="2'-OMe-nucleotide"
  modified_base 2..2: /mod_base="OTHER" /note="2'-OMe-nucleotide"
  modified_base 3..3: /mod_base="OTHER" /note="2'-OMe-nucleotide"
  modified_base 4..4: /mod_base="OTHER" /note="2'-fluoro-nucleotide"
  modified_base 5..5: /mod_base="OTHER" /note="2'-OMe-nucleotide"
  modified_base 6..6: /mod_base="OTHER" /note="2'-fluoro-nucleotide"
  modified_base 7..7: /mod_base="OTHER" /note="2'-OMe-nucleotide"
  modified_base 8..8: /mod_base="OTHER" /note="2'-fluoro-nucleotide"
  modified_base 9..9: /mod_base="OTHER" /note="2'-OMe-nucleotide"
  modified_base 10..10: /mod_base="OTHER" /note="2'-fluoro-nucleotide"
  modified_base 11..11: /mod_base="OTHER" /note="2'-OMe-nucleotide"
  modified_base 12..12: /mod_base="OTHER" /note="2'-fluoro-nucleotide"
  modified_base 13..13: /mod_base="OTHER" /note="2'-OMe-nucleotide"
  modified_base 14..14: /mod_base="OTHER" /note="2'-fluoro-nucleotide"
  modified_base 15..15: /mod_base="OTHER" /note="2'-OMe-nucleotide"
  modified_base 16..16: /mod_base="OTHER" /note="2'-fluoro-nucleotide"
  modified_base 17..17: /mod_base="OTHER" /note="2'-OMe-nucleotide"
  modified_base 18..18: /mod_base="OTHER" /note="2'-fluoro-nucleotide"
  modified_base 19..19: /mod_base="OTHER" /note="2'-OMe-nucleotide"
  modified_base 20..20: /mod_base="OTHER" /note="2'-fluoro-nucleotide"
  modified_base 21..21: /mod_base="OTHER" /note="2'-OMe-nucleotide"
  modified_base 22..22: /mod_base="OTHER" /note="2'-fluoro-nucleotide"
  modified_base 23..23: /mod_base="OTHER" /note="Inverted nucleotide"
ccacaucgaguuaaaguuuauat

SEQ ID NO: 537 - DNA, 23 bp, Artificial Sequence
  Description of Artificial Sequence: Synthetic oligonucleotide
  Description of Combined DNA/RNA Molecule: Synthetic oligonucleotide
  N-term hydroxyl group
  C-term hydroxyl group
  modified_base 1..1: /mod_base="OTHER" /note="2'-OMe-nucleotide"
  modified_base 2..2: /mod_base="OTHER" /note="2'-OMe-nucleotide"
  modified_base 3..3: /mod_base="OTHER" /note="2'-OMe-nucleotide"
  modified_base 4..4: /mod_base="OTHER" /note="2'-fluoro-nucleotide"
  modified_base 5..5: /mod_base="OTHER" /note="2'-OMe-nucleotide"
  modified_base 6..6: /mod_base="OTHER" /note="2'-fluoro-nucleotide"
  modified_base 7..7: /mod_base="OTHER" /note="2'-OMe-nucleotide"
  modified_base 8..8: /mod_base="OTHER" /note="2'-fluoro-nucleotide"
  modified_base 9..9: /mod_base="OTHER" /note="2'-OMe-nucleotide"
  modified_base 10..10: /mod_base="OTHER" /note="2'-fluoro-nucleotide"
  modified_base 11..11: /mod_base="OTHER" /note="2'-OMe-nucleotide"
  modified_base 12..12: /mod_base="OTHER" /note="2'-fluoro-nucleotide"
  modified_base 13..13: /mod_base="OTHER" /note="2'-OMe-nucleotide"
  modified_base 14..14: /mod_base="OTHER" /note="2'-fluoro-nucleotide"
  modified_base 15..15: /mod_base="OTHER" /note="2'-OMe-nucleotide"
  modified_base 16..16: /mod_base="OTHER" /note="2'-fluoro-nucleotide"
  modified_base 17..17: /mod_base="OTHER" /note="2'-OMe-nucleotide"
  modified_base 18..18: /mod_base="OTHER" /note="2'-fluoro-nucleotide"
  modified_base 19..19: /mod_base="OTHER" /note="2'-OMe-nucleotide"
  modified_base 20..20: /mod_base="OTHER" /note="2'-fluoro-nucleotide"
  modified_base 21..21: /mod_base="OTHER" /note="2'-OMe-nucleotide"
  modified_base 22..22: /mod_base="OTHER" /note="2'-fluoro-nucleotide"
  modified_base 23..23: /mod_base="OTHER" /note="Inverted nucleotide"
ccaaucgaguuaaaguuuauaut

SEQ ID NO: 538 - DNA, 23 bp, Artificial Sequence
  Description of Artificial Sequence: Synthetic oligonucleotide
  Description of Combined DNA/RNA Molecule: Synthetic oligonucleotide
  N-term hydroxyl group
  C-term hydroxyl group
  modified_base 1..1: /mod_base="OTHER" /note="2'-OMe-nucleotide"
  modified_base 2..2: /mod_base="OTHER" /note="2'-OMe-nucleotide"
  modified_base 3..3: /mod_base="OTHER" /note="2'-OMe-nucleotide"
  modified_base 4..4: /mod_base="OTHER" /note="2'-fluoro-nucleotide"
  modified_base 5..5: /mod_base="OTHER" /note="2'-OMe-nucleotide"
  modified_base 6..6: /mod_base="OTHER" /note="2'-fluoro-nucleotide"
  modified_base 7..7: /mod_base="OTHER" /note="2'-OMe-nucleotide"
  modified_base 8..8: /mod_base="OTHER" /note="2'-fluoro-nucleotide"
  modified_base 9..9: /mod_base="OTHER" /note="2'-OMe-nucleotide"
  modified_base 10..10: /mod_base="OTHER" /note="2'-fluoro-nucleotide"
  modified_base 11..11: /mod_base="OTHER" /note="2'-OMe-nucleotide"
  modified_base 12..12: /mod_base="OTHER" /note="2'-fluoro-nucleotide"
  modified_base 13..13: /mod_base="OTHER" /note="2'-OMe-nucleotide"
  modified_base 14..14: /mod_base="OTHER" /note="2'-fluoro-nucleotide"
  modified_base 15..15: /mod_base="OTHER" /note="2'-OMe-nucleotide"
  modified_base 16..16: /mod_base="OTHER" /note="2'-fluoro-nucleotide"
  modified_base 17..17: /mod_base="OTHER" /note="2'-OMe-nucleotide"
  modified_base 18..18: /mod_base="OTHER" /note="2'-fluoro-nucleotide"
  modified_base 19..19: /mod_base="OTHER" /note="2'-OMe-nucleotide"
  modified_base 20..20: /mod_base="OTHER" /note="2'-fluoro-nucleotide"
  modified_base 21..21: /mod_base="OTHER" /note="2'-OMe-nucleotide"
  modified_base 22..22: /mod_base="OTHER" /note="2'-fluoro-nucleotide"
  modified_base 23..23: /mod_base="OTHER" /note="Inverted nucleotide"
ccaucgaguuaaaguuuauauut

SEQ ID NO: 539 - DNA, 23 bp, Artificial Sequence
  Description of Artificial Sequence: Synthetic oligonucleotide
  Description of Combined DNA/RNA Molecule: Synthetic oligonucleotide
  N-term hydroxyl group
  C-term hydroxyl group
  modified_base 1..1: /mod_base="OTHER" /note="2'-OMe-nucleotide"
  modified_base 2..2: /mod_base="OTHER" /note="2'-OMe-nucleotide"
  modified_base 3..3: /mod_base="OTHER" /note="2'-OMe-nucleotide"
  modified_base 4..4: /mod_base="OTHER" /note="2'-fluoro-nucleotide"
  modified_base 5..5: /mod_base="OTHER" /note="2'-OMe-nucleotide"
  modified_base 6..6: /mod_base="OTHER" /note="2'-fluoro-nucleotide"
  modified_base 7..7: /mod_base="OTHER" /note="2'-OMe-nucleotide"
  modified_base 8..8: /mod_base="OTHER" /note="2'-fluoro-nucleotide"
  modified_base 9..9: /mod_base="OTHER" /note="2'-OMe-nucleotide"
  modified_base 10..10: /mod_base="OTHER" /note="2'-fluoro-nucleotide"
  modified_base 11..11: /mod_base="OTHER" /note="2'-OMe-nucleotide"
  modified_base 12..12: /mod_base="OTHER" /note="2'-fluoro-nucleotide"
  modified_base 13..13: /mod_base="OTHER" /note="2'-OMe-nucleotide"
  modified_base 14..14: /mod_base="OTHER" /note="2'-fluoro-nucleotide"
  modified_base 15..15: /mod_base="OTHER" /note="2'-OMe-nucleotide"
  modified_base 16..16: /mod_base="OTHER" /note="2'-fluoro-nucleotide"
  modified_base 17..17: /mod_base="OTHER" /note="2'-OMe-nucleotide"
  modified_base 18..18: /mod_base="OTHER" /note="2'-fluoro-nucleotide"
  modified_base 19..19: /mod_base="OTHER" /note="2'-OMe-nucleotide"
  modified_base 20..20: /mod_base="OTHER" /note="2'-fluoro-nucleotide"
  modified_base 21..21: /mod_base="OTHER" /note="2'-OMe-nucleotide"
  modified_base 22..22: /mod_base="OTHER" /note="2'-fluoro-nucleotide"
  modified_base 23..23: /mod_base="OTHER" /note="Inverted nucleotide"
ccacgaguuaaaguuuauauuut

SEQ ID NO: 540 - DNA, 23 bp, Artificial Sequence
  Description of Artificial Sequence: Synthetic oligonucleotide
  Description of Combined DNA/RNA Molecule: Synthetic oligonucleotide
  N-term hydroxyl group
  C-term hydroxyl group
  modified_base 1..1: /mod_base="OTHER" /note="2'-OMe-nucleotide"
  modified_base 2..2: /mod_base="OTHER" /note="2'-OMe-nucleotide"
  modified_base 3..3: /mod_base="OTHER" /note="2'-OMe-nucleotide"
  modified_base 4..4: /mod_base="OTHER" /note="2'-fluoro-nucleotide"
  modified_base 5..5: /mod_base="OTHER" /note="2'-OMe-nucleotide"
  modified_base 6..6: /mod_base="OTHER" /note="2'-fluoro-nucleotide"
  modified_base 7..7: /mod_base="OTHER" /note="2'-OMe-nucleotide"
  modified_base 8..8: /mod_base="OTHER" /note="2'-fluoro-nucleotide"
  modified_base 9..9: /mod_base="OTHER" /note="2'-OMe-nucleotide"
  modified_base 10..10: /mod_base="OTHER" /note="2'-fluoro-nucleotide"
  modified_base 11..11: /mod_base="OTHER" /note="2'-OMe-nucleotide"
  modified_base 12..12: /mod_base="OTHER" /note="2'-fluoro-nucleotide"
  modified_base 13..13: /mod_base="OTHER" /note="2'-OMe-nucleotide"
  modified_base 14..14: /mod_base="OTHER" /note="2'-fluoro-nucleotide"
  modified_base 15..15: /mod_base="OTHER" /note="2'-OMe-nucleotide"
  modified_base 16..16: /mod_base="OTHER" /note="2'-fluoro-nucleotide"
  modified_base 17..17: /mod_base="OTHER" /note="2'-OMe-nucleotide"
  modified_base 18..18: /mod_base="OTHER" /note="2'-fluoro-nucleotide"
  modified_base 19..19: /mod_base="OTHER" /note="2'-OMe-nucleotide"
  modified_base 20..20: /mod_base="OTHER" /note="2'-fluoro-nucleotide"
  modified_base 21..21: /mod_base="OTHER" /note="2'-OMe-nucleotide"
  modified_base 22..22: /mod_base="OTHER" /note="2'-fluoro-nucleotide"
  modified_base 23..23: /mod_base="OTHER" /note="Inverted nucleotide"
ccaaaguuuauauuuccccuaat

SEQ ID NO: 541 - DNA, 23 bp, Artificial Sequence
  Description of Artificial Sequence: Synthetic oligonucleotide
  Description of Combined DNA/RNA Molecule: Synthetic oligonucleotide
  N-term hydroxyl group
  C-term hydroxyl group
  modified_base 1..1: /mod_base="OTHER" /note="2'-OMe-nucleotide"
  modified_base 2..2: /mod_base="OTHER" /note="2'-OMe-nucleotide"
  modified_base 3..3: /mod_base="OTHER" /note="2'-OMe-nucleotide"
  modified_base 4..4: /mod_base="OTHER" /note="2'-fluoro-nucleotide"
  modified_base 5..5: /mod_base="OTHER" /note="2'-OMe-nucleotide"
  modified_base 6..6: /mod_base="OTHER" /note="2'-fluoro-nucleotide"
  modified_base 7..7: /mod_base="OTHER" /note="2'-OMe-nucleotide"
  modified_base 8..8: /mod_base="OTHER" /note="2'-fluoro-nucleotide"
  modified_base 9..9: /mod_base="OTHER" /note="2'-OMe-nucleotide"
  modified_base 10..10: /mod_base="OTHER" /note="2'-fluoro-nucleotide"
  modified_base 11..11: /mod_base="OTHER" /note="2'-OMe-nucleotide"
  modified_base 12..12: /mod_base="OTHER" /note="2'-fluoro-nucleotide"
  modified_base 13..13: /mod_base="OTHER" /note="2'-OMe-nucleotide"
  modified_base 14..14: /mod_base="OTHER" /note="2'-fluoro-nucleotide"
  modified_base 15..15: /mod_base="OTHER" /note="2'-OMe-nucleotide"
  modified_base 16..16: /mod_base="OTHER" /note="2'-fluoro-nucleotide"
  modified_base 17..17: /mod_base="OTHER" /note="2'-OMe-nucleotide"
  modified_base 18..18: /mod_base="OTHER" /note="2'-fluoro-nucleotide"
  modified_base 19..19: /mod_base="OTHER" /note="2'-OMe-nucleotide"
  modified_base 20..20: /mod_base="OTHER" /note="2'-fluoro-nucleotide"
  modified_base 21..21: /mod_base="OTHER" /note="2'-OMe-nucleotide"
  modified_base 22..22: /mod_base="OTHER" /note="2'-fluoro-nucleotide"
  modified_base 23..23: /mod_base="OTHER" /note="Inverted nucleotide"
ccaaguuuauauuuccccuaaat

SEQ ID NO: 542 - DNA, 23 bp, Artificial Sequence
  Description of Artificial Sequence: Synthetic oligonucleotide
  Description of Combined DNA/RNA Molecule: Synthetic oligonucleotide
  N-term hydroxyl group
  C-term hydroxyl group
  modified_base 1..1: /mod_base="OTHER" /note="2'-OMe-nucleotide"
  modified_base 2..2: /mod_base="OTHER" /note="2'-OMe-nucleotide"
  modified_base 3..3: /mod_base="OTHER" /note="2'-OMe-nucleotide"
  modified_base 4..4: /mod_base="OTHER" /note="2'-fluoro-nucleotide"
  modified_base 5..5: /mod_base="OTHER" /note="2'-OMe-nucleotide"
  modified_base 6..6: /mod_base="OTHER" /note="2'-fluoro-nucleotide"
  modified_base 7..7: /mod_base="OTHER" /note="2'-OMe-nucleotide"
  modified_base 8..8: /mod_base="OTHER" /note="2'-fluoro-nucleotide"
  modified_base 9..9: /mod_base="OTHER" /note="2'-OMe-nucleotide"
  modified_base 10..10: /mod_base="OTHER" /note="2'-fluoro-nucleotide"
  modified_base 11..11: /mod_base="OTHER" /note="2'-OMe-nucleotide"
  modified_base 12..12: /mod_base="OTHER" /note="2'-fluoro-nucleotide"
  modified_base 13..13: /mod_base="OTHER" /note="2'-OMe-nucleotide"
  modified_base 14..14: /mod_base="OTHER" /note="2'-fluoro-nucleotide"
  modified_base 15..15: /mod_base="OTHER" /note="2'-OMe-nucleotide"
  modified_base 16..16: /mod_base="OTHER" /note="2'-fluoro-nucleotide"
  modified_base 17..17: /mod_base="OTHER" /note="2'-OMe-nucleotide"
  modified_base 18..18: /mod_base="OTHER" /note="2'-fluoro-nucleotide"
  modified_base 19..19: /mod_base="OTHER" /note="2'-OMe-nucleotide"
  modified_base 20..20: /mod_base="OTHER" /note="2'-fluoro-nucleotide"
  modified_base 21..21: /mod_base="OTHER" /note="2'-OMe-nucleotide"
  modified_base 22..22: /mod_base="OTHER" /note="2'-fluoro-nucleotide"
  modified_base 23..23: /mod_base="OTHER" /note="Inverted nucleotide"
ccaauuuccccuaaauaugcugt

SEQ ID NO: 543 - DNA, 23 bp, Artificial Sequence
  Description of Artificial Sequence: Synthetic oligonucleotide
  Description of Combined DNA/RNA Molecule: Synthetic oligonucleotide
  N-term hydroxyl group
  C-term hydroxyl group
  modified_base 1..1: /mod_base="OTHER" /note="2'-OMe-nucleotide"
  modified_base 2..2: /mod_base="OTHER" /note="2'-OMe-nucleotide"
  modified_base 3..3: /mod_base="OTHER" /note="2'-OMe-nucleotide"
  modified_base 4..4: /mod_base="OTHER" /note="2'-fluoro-nucleotide"
  modified_base 5..5: /mod_base="OTHER" /note="2'-OMe-nucleotide"
  modified_base 6..6: /mod_base="OTHER" /note="2'-fluoro-nucleotide"
  modified_base 7..7: /mod_base="OTHER" /note="2'-OMe-nucleotide"
  modified_base 8..8: /mod_base="OTHER" /note="2'-fluoro-nucleotide"
  modified_base 9..9: /mod_base="OTHER" /note="2'-OMe-nucleotide"
  modified_base 10..10: /mod_base="OTHER" /note="2'-fluoro-nucleotide"
  modified_base 11..11: /mod_base="OTHER" /note="2'-OMe-nucleotide"
  modified_base 12..12: /mod_base="OTHER" /note="2'-fluoro-nucleotide"
  modified_base 13..13: /mod_base="OTHER" /note="2'-OMe-nucleotide"
  modified_base 14..14: /mod_base="OTHER" /note="2'-fluoro-nucleotide"
  modified_base 15..15: /mod_base="OTHER" /note="2'-OMe-nucleotide"
  modified_base 16..16: /mod_base="OTHER" /note="2'-fluoro-nucleotide"
  modified_base 17..17: /mod_base="OTHER" /note="2'-OMe-nucleotide"
  modified_base 18..18: /mod_base="OTHER" /note="2'-fluoro-nucleotide"
  modified_base 19..19: /mod_base="OTHER" /note="2'-OMe-nucleotide"
  modified_base 20..20: /mod_base="OTHER" /note="2'-fluoro-nucleotide"
  modified_base 21..21: /mod_base="OTHER" /note="2'-OMe-nucleotide"
  modified_base 22..22: /mod_base="OTHER" /note="2'-fluoro-nucleotide"
  modified_base 23..23: /mod_base="OTHER" /note="Inverted nucleotide"
ccacccuaaaucccuaaagauut

SEQ ID NO: 544 - DNA, 23 bp, Artificial Sequence
  Description of Artificial Sequence: Synthetic oligonucleotide
  Description of Combined DNA/RNA Molecule: Synthetic oligonucleotide
  N-term hydroxyl group
  C-term hydroxyl group
  modified_base 1..1: /mod_base="OTHER" /note="2'-OMe-nucleotide"
  modified_base 2..2: /mod_base="OTHER" /note="2'-OMe-nucleotide"
  modified_base 3..3: /mod_base="OTHER" /note="2'-OMe-nucleotide"
  modified_base 4..4: /mod_base="OTHER" /note="2'-fluoro-nucleotide"
  modified_base 5..5: /mod_base="OTHER" /note="2'-OMe-nucleotide"
  modified_base 6..6: /mod_base="OTHER" /note="2'-fluoro-nucleotide"
  modified_base 7..7: /mod_base="OTHER" /note="2'-OMe-nucleotide"
  modified_base 8..8: /mod_base="OTHER" /note="2'-fluoro-nucleotide"
  modified_base 9..9: /mod_base="OTHER" /note="2'-OMe-nucleotide"
  modified_base 10..10: /mod_base="OTHER" /note="2'-fluoro-nucleotide"
  modified_base 11..11: /mod_base="OTHER" /note="2'-OMe-nucleotide"
  modified_base 12..12: /mod_base="OTHER" /note="2'-fluoro-nucleotide"
  modified_base 13..13: /mod_base="OTHER" /note="2'-OMe-nucleotide"
  modified_base 14..14: /mod_base="OTHER" /note="2'-fluoro-nucleotide"
  modified_base 15..15: /mod_base="OTHER" /note="2'-OMe-nucleotide"
  modified_base 16..16: /mod_base="OTHER" /note="2'-fluoro-nucleotide"
  modified_base 17..17: /mod_base="OTHER" /note="2'-OMe-nucleotide"
  modified_base 18..18: /mod_base="OTHER" /note="2'-fluoro-nucleotide"
  modified_base 19..19: /mod_base="OTHER" /note="2'-OMe-nucleotide"
  modified_base 20..20: /mod_base="OTHER" /note="2'-fluoro-nucleotide"
  modified_base 21..21: /mod_base="OTHER" /note="2'-OMe-nucleotide"
  modified_base 22..22: /mod_base="OTHER" /note="2'-fluoro-nucleotide"
  modified_base 23..23: /mod_base="OTHER" /note="Inverted nucleotide"
ccaccuaaaucccuaaagauuat

SEQ ID NO: 545 - DNA, 23 bp, Artificial Sequence
  Description of Artificial Sequence: Synthetic oligonucleotide
  Description of Combined DNA/RNA Molecule: Synthetic oligonucleotide
  N-term hydroxyl group
  C-term hydroxyl group
  modified_base 1..1: /mod_base="OTHER" /note="2'-OMe-nucleotide"
  modified_base 2..2: /mod_base="OTHER" /note="2'-OMe-nucleotide"
  modified_base 3..3: /mod_base="OTHER" /note="2'-OMe-nucleotide"
  modified_base 4..4: /mod_base="OTHER" /note="2'-fluoro-nucleotide"
  modified_base 5..5: /mod_base="OTHER" /note="2'-OMe-nucleotide"
  modified_base 6..6: /mod_base="OTHER" /note="2'-fluoro-nucleotide"
  modified_base 7..7: /mod_base="OTHER" /note="2'-OMe-nucleotide"
  modified_base 8..8: /mod_base="OTHER" /note="2'-fluoro-nucleotide"
  modified_base 9..9: /mod_base="OTHER" /note="2'-OMe-nucleotide"
  modified_base 10..10: /mod_base="OTHER" /note="2'-fluoro-nucleotide"
  modified_base 11..11: /mod_base="OTHER" /note="2'-OMe-nucleotide"
  modified_base 12..12: /mod_base="OTHER" /note="2'-fluoro-nucleotide"
  modified_base 13..13: /mod_base="OTHER" /note="2'-OMe-nucleotide"
  modified_base 14..14: /mod_base="OTHER" /note="2'-fluoro-nucleotide"
  modified_base 15..15: /mod_base="OTHER" /note="2'-OMe-nucleotide"
  modified_base 16..16: /mod_base="OTHER" /note="2'-fluoro-nucleotide"
  modified_base 17..17: /mod_base="OTHER" /note="2'-OMe-nucleotide"
  modified_base 18..18: /mod_base="OTHER" /note="2'-fluoro-nucleotide"
  modified_base 19..19: /mod_base="OTHER" /note="2'-OMe-nucleotide"
  modified_base 20..20: /mod_base="OTHER" /note="2'-fluoro-nucleotide"
  modified_base 21..21: /mod_base="OTHER" /note="2'-OMe-nucleotide"
  modified_base 22..22: /mod_base="OTHER" /note="2'-fluoro-nucleotide"
  modified_base 23..23: /mod_base="OTHER" /note="Inverted nucleotide"
ccacuaaaucccuaaagauuagt

SEQ ID NO: 546 - DNA, 23 bp, Artificial Sequence
  Description of Artificial Sequence: Synthetic oligonucleotide
  Description of Combined DNA/RNA Molecule: Synthetic oligonucleotide
  N-term hydroxyl group
  C-term hydroxyl group
  modified_base 1..1: /mod_base="OTHER" /note="2'-OMe-nucleotide"
  modified_base 2..2: /mod_base="OTHER" /note="2'-OMe-nucleotide"
  modified_base 3..3: /mod_base="OTHER" /note="2'-OMe-nucleotide"
  modified_base 4..4: /mod_base="OTHER" /note="2'-fluoro-nucleotide"
  modified_base 5..5: /mod_base="OTHER" /note="2'-OMe-nucleotide"
  modified_base 6..6: /mod_base="OTHER" /note="2'-fluoro-nucleotide"
  modified_base 7..7: /mod_base="OTHER" /note="2'-OMe-nucleotide"
  modified_base 8..8: /mod_base="OTHER" /note="2'-fluoro-nucleotide"
  modified_base 9..9: /mod_base="OTHER" /note="2'-OMe-nucleotide"
  modified_base 10..10: /mod_base="OTHER" /note="2'-fluoro-nucleotide"
  modified_base 11..11: /mod_base="OTHER" /note="2'-OMe-nucleotide"
  modified_base 12..12: /mod_base="OTHER" /note="2'-fluoro-nucleotide"
  modified_base 13..13: /mod_base="OTHER" /note="2'-OMe-nucleotide"
  modified_base 14..14: /mod_base="OTHER" /note="2'-fluoro-nucleotide"
  modified_base 15..15: /mod_base="OTHER" /note="2'-OMe-nucleotide"
  modified_base 16..16: /mod_base="OTHER" /note="2'-fluoro-nucleotide"
  modified_base 17..17: /mod_base="OTHER" /note="2'-OMe-nucleotide"
  modified_base 18..18: /mod_base="OTHER" /note="2'-fluoro-nucleotide"
  modified_base 19..19: /mod_base="OTHER" /note="2'-OMe-nucleotide"
  modified_base 20..20: /mod_base="OTHER" /note="2'-fluoro-nucleotide"
  modified_base 21..21: /mod_base="OTHER" /note="2'-OMe-nucleotide"
  modified_base 22..22: /mod_base="OTHER" /note="2'-fluoro-nucleotide"
  modified_base 23..23: /mod_base="OTHER" /note="Inverted nucleotide"
ccauaaaucccuaaagauuagat

SEQ ID NO: 547 - DNA, 23 bp, Artificial Sequence
  Description of Artificial Sequence: Synthetic oligonucleotide
  Description of Combined DNA/RNA Molecule: Synthetic oligonucleotide
  N-term hydroxyl group
  C-term hydroxyl group
  modified_base 1..1: /mod_base="OTHER" /note="2'-OMe-nucleotide"
  modified_base 2..2: /mod_base="OTHER" /note="2'-OMe-nucleotide"
  modified_base 3..3: /mod_base="OTHER" /note="2'-OMe-nucleotide"
  modified_base 4..4: /mod_base="OTHER" /note="2'-fluoro-nucleotide"
  modified_base 5..5: /mod_base="OTHER" /note="2'-OMe-nucleotide"
  modified_base 6..6: /mod_base="OTHER" /note="2'-fluoro-nucleotide"
  modified_base 7..7: /mod_base="OTHER" /note="2'-OMe-nucleotide"
  modified_base 8..8: /mod_base="OTHER" /note="2'-fluoro-nucleotide"
  modified_base 9..9: /mod_base="OTHER" /note="2'-OMe-nucleotide"
  modified_base 10..10: /mod_base="OTHER" /note="2'-fluoro-nucleotide"
  modified_base 11..11: /mod_base="OTHER" /note="2'-OMe-nucleotide"
  modified_base 12..12: /mod_base="OTHER" /note="2'-fluoro-nucleotide"
  modified_base 13..13: /mod_base="OTHER" /note="2'-OMe-nucleotide"
  modified_base 14..14: /mod_base="OTHER" /note="2'-fluoro-nucleotide"
  modified_base 15..15: /mod_base="OTHER" /note="2'-OMe-nucleotide"
  modified_base 16..16: /mod_base="OTHER" /note="2'-fluoro-nucleotide"
  modified_base 17..17: /mod_base="OTHER" /note="2'-OMe-nucleotide"
  modified_base 18..18: /mod_base="OTHER" /note="2'-fluoro-nucleotide"
  modified_base 19..19: /mod_base="OTHER" /note="2'-OMe-nucleotide"
  modified_base 20..20: /mod_base="OTHER" /note="2'-fluoro-nucleotide"
  modified_base 21..21: /mod_base="OTHER" /note="2'-OMe-nucleotide"
  modified_base 22..22: /mod_base="OTHER" /note="2'-fluoro-nucleotide"
  modified_base 23..23: /mod_base="OTHER" /note="Inverted nucleotide"
ccaaaaucccuaaagauuagaut

SEQ ID NO: 548 - DNA, 23 bp, Artificial Sequence
  Description of Artificial Sequence: Synthetic oligonucleotide
  Description of Combined DNA/RNA Molecule: Synthetic oligonucleotide
  N-term hydroxyl group
  C-term hydroxyl group
  modified_base 1..1: /mod_base="OTHER" /note="2'-OMe-nucleotide"
  modified_base 2..2: /mod_base="OTHER" /note="2'-OMe-nucleotide"
  modified_base 3..3: /mod_base="OTHER" /note="2'-OMe-nucleotide"
  modified_base 4..4: /mod_base="OTHER" /note="2'-fluoro-nucleotide"
  modified_base 5..5: /mod_base="OTHER" /note="2'-OMe-nucleotide"
  modified_base 6..6: /mod_base="OTHER" /note="2'-fluoro-nucleotide"
  modified_base 7..7: /mod_base="OTHER" /note="2'-OMe-nucleotide"
  modified_base 8..8: /mod_base="OTHER" /note="2'-fluoro-nucleotide"
  modified_base 9..9: /mod_base="OTHER" /note="2'-OMe-nucleotide"
  modified_base 10..10: /mod_base="OTHER" /note="2'-fluoro-nucleotide"
  modified_base 11..11: /mod_base="OTHER" /note="2'-OMe-nucleotide"
  modified_base 12..12: /mod_base="OTHER" /note="2'-fluoro-nucleotide"
  modified_base 13..13: /mod_base="OTHER" /note="2'-OMe-nucleotide"
  modified_base 14..14: /mod_base="OTHER" /note="2'-fluoro-nucleotide"
  modified_base 15..15: /mod_base="OTHER" /note="2'-OMe-nucleotide"
  modified_base 16..16: /mod_base="OTHER" /note="2'-fluoro-nucleotide"
  modified_base 17..17: /mod_base="OTHER" /note="2'-OMe-nucleotide"
  modified_base 18..18: /mod_base="OTHER" /note="2'-fluoro-nucleotide"
  modified_base 19..19: /mod_base="OTHER" /note="2'-OMe-nucleotide"
  modified_base 20..20: /mod_base="OTHER" /note="2'-fluoro-nucleotide"
  modified_base 21..21: /mod_base="OTHER" /note="2'-OMe-nucleotide"
  modified_base 22..22: /mod_base="OTHER" /note="2'-fluoro-nucleotide"
  modified_base 23..23: /mod_base="OTHER" /note="Inverted nucleotide"
ccauuaaacccauuuguuaaagt

SEQ ID NO: 549 - DNA, 23 bp, Artificial Sequence
  Description of Artificial Sequence: Synthetic oligonucleotide
  Description of Combined DNA/RNA Molecule: Synthetic oligonucleotide
  N-term hydroxyl group
  C-term hydroxyl group
  modified_base 1..1: /mod_base="OTHER" /note="2'-OMe-nucleotide"
  modified_base 2..2: /mod_base="OTHER" /note="2'-OMe-nucleotide"
  modified_base 3..3: /mod_base="OTHER" /note="2'-OMe-nucleotide"
  modified_base 4..4: /mod_base="OTHER" /note="2'-fluoro-nucleotide"
  modified_base 5..5: /mod_base="OTHER" /note="2'-OMe-nucleotide"
  modified_base 6..6: /mod_base="OTHER" /note="2'-fluoro-nucleotide"
  modified_base 7..7: /mod_base="OTHER" /note="2'-OMe-nucleotide"
  modified_base 8..8: /mod_base="OTHER" /note="2'-fluoro-nucleotide"
  modified_base 9..9: /mod_base="OTHER" /note="2'-OMe-nucleotide"
  modified_base 10..10: /mod_base="OTHER" /note="2'-fluoro-nucleotide"
  modified_base 11..11: /mod_base="OTHER" /note="2'-OMe-nucleotide"
  modified_base 12..12: /mod_base="OTHER" /note="2'-fluoro-nucleotide"
  modified_base 13..13: /mod_base="OTHER" /note="2'-OMe-nucleotide"
  modified_base 14..14: /mod_base="OTHER" /note="2'-fluoro-nucleotide"
  modified_base 15..15: /mod_base="OTHER" /note="2'-OMe-nucleotide"
  modified_base 16..16: /mod_base="OTHER" /note="2'-fluoro-nucleotide"
  modified_base 17..17: /mod_base="OTHER" /note="2'-OMe-nucleotide"
  modified_base 18..18: /mod_base="OTHER" /note="2'-fluoro-nucleotide"
  modified_base 19..19: /mod_base="OTHER" /note="2'-OMe-nucleotide"
  modified_base 20..20: /mod_base="OTHER" /note="2'-fluoro-nucleotide"
  modified_base 21..21: /mod_base="OTHER" /note="2'-OMe-nucleotide"
  modified_base 22..22: /mod_base="OTHER" /note="2'-fluoro-nucleotide"
  modified_base 23..23: /mod_base="OTHER" /note="Inverted nucleotide"
ccauuuguuaaaggauauagugt

SEQ ID NO: 550 - DNA, 23 bp, Artificial Sequence
  Description of Artificial Sequence: Synthetic oligonucleotide
  Description of Combined DNA/RNA Molecule: Synthetic oligonucleotide
  N-term hydroxyl group
  C-term hydroxyl group
  modified_base 1..1: /mod_base="OTHER" /note="2'-OMe-nucleotide"
  modified_base 2..2: /mod_base="OTHER" /note="2'-OMe-nucleotide"
  modified_base 3..3: /mod_base="OTHER" /note="2'-OMe-nucleotide"
  modified_base 4..4: /mod_base="OTHER" /note="2'-fluoro-nucleotide"
  modified_base 5..5: /mod_base="OTHER" /note="2'-OMe-nucleotide"
  modified_base 6..6: /mod_base="OTHER" /note="2'-fluoro-nucleotide"
  modified_base 7..7: /mod_base="OTHER" /note="2'-OMe-nucleotide"
  modified_base 8..8: /mod_base="OTHER" /note="2'-fluoro-nucleotide"
  modified_base 9..9: /mod_base="OTHER" /note="2'-OMe-nucleotide"
  modified_base 10..10: /mod_base="OTHER" /note="2'-fluoro-nucleotide"
  modified_base 11..11: /mod_base="OTHER" /note="2'-OMe-nucleotide"
  modified_base 12..12: /mod_base="OTHER" /note="2'-fluoro-nucleotide"
  modified_base 13..13: /mod_base="OTHER" /note="2'-OMe-nucleotide"
  modified_base 14..14: /mod_base="OTHER" /note="2'-fluoro-nucleotide"
  modified_base 15..15: /mod_base="OTHER" /note="2'-OMe-nucleotide"
  modified_base 16..16: /mod_base="OTHER" /note="2'-fluoro-nucleotide"
  modified_base 17..17: /mod_base="OTHER" /note="2'-OMe-nucleotide"
  modified_base 18..18: /mod_base="OTHER" /note="2'-fluoro-nucleotide"
  modified_base 19..19: /mod_base="OTHER" /note="2'-OMe-nucleotide"
  modified_base 20..20: /mod_base="OTHER" /note="2'-fluoro-nucleotide"
  modified_base 21..21: /mod_base="OTHER" /note="2'-OMe-nucleotide"
  modified_base 22..22: /mod_base="OTHER" /note="2'-fluoro-nucleotide"
  modified_base 23..23: /mod_base="OTHER" /note="Inverted nucleotide"
ccauuguuaaaggauauagugct

SEQ ID NO: 551 - DNA, 23 bp, Artificial Sequence
  Description of Artificial Sequence: Synthetic oligonucleotide
  Description of Combined DNA/RNA Molecule: Synthetic oligonucleotide
  N-term hydroxyl group
  C-term hydroxyl group
  modified_base 1..1: /mod_base="OTHER" /note="2'-OMe-nucleotide"
  modified_base 2..2: /mod_base="OTHER" /note="2'-OMe-nucleotide"
  modified_base 3..3: /mod_base="OTHER" /note="2'-OMe-nucleotide"
  modified_base 4..4: /mod_base="OTHER" /note="2'-fluoro-nucleotide"
  modified_base 5..5: /mod_base="OTHER" /note="2'-OMe-nucleotide"
  modified_base 6..6: /mod_base="OTHER" /note="2'-fluoro-nucleotide"
  modified_base 7..7: /mod_base="OTHER" /note="2'-OMe-nucleotide"
  modified_base 8..8: /mod_base="OTHER" /note="2'-fluoro-nucleotide"
  modified_base 9..9: /mod_base="OTHER" /note="2'-OMe-nucleotide"
  modified_base 10..10: /mod_base="OTHER" /note="2'-fluoro-nucleotide"
  modified_base 11..11: /mod_base="OTHER" /note="2'-OMe-nucleotide"
  modified_base 12..12: /mod_base="OTHER" /note="2'-fluoro-nucleotide"
  modified_base 13..13: /mod_base="OTHER" /note="2'-OMe-nucleotide"
  modified_base 14..14: /mod_base="OTHER" /note="2'-fluoro-nucleotide"
  modified_base 15..15: /mod_base="OTHER" /note="2'-OMe-nucleotide"
  modified_base 16..16: /mod_base="OTHER" /note="2'-fluoro-nucleotide"
  modified_base 17..17: /mod_base="OTHER" /note="2'-OMe-nucleotide"
  modified_base 18..18: /mod_base="OTHER" /note="2'-fluoro-nucleotide"
  modified_base 19..19: /mod_base="OTHER" /note="2'-OMe-nucleotide"
  modified_base 20..20: /mod_base="OTHER" /note="2'-fluoro-nucleotide"
  modified_base 21..21: /mod_base="OTHER" /note="2'-OMe-nucleotide"
  modified_base 22..22: /mod_base="OTHER" /note="2'-fluoro-nucleotide"
  modified_base 23..23: /mod_base="OTHER" /note="Inverted nucleotide"
ccauguuaaaggauauagugcct

SEQ ID NO: 552 - DNA, 23 bp, Artificial Sequence
  Description of Artificial Sequence: Synthetic oligonucleotide
  Description of Combined DNA/RNA Molecule: Synthetic oligonucleotide
  N-term hydroxyl group
  C-term hydroxyl group
  modified_base 1..1: /mod_base="OTHER" /note="2'-OMe-nucleotide"
  modified_base 2..2: /mod_base="OTHER" /note="2'-OMe-nucleotide"
  modified_base 3..3: /mod_base="OTHER" /note="2'-OMe-nucleotide"
  modified_base 4..4: /mod_base="OTHER" /note="2'-fluoro-nucleotide"
  modified_base 5..5: /mod_base="OTHER" /note="2'-OMe-nucleotide"
  modified_base 6..6: /mod_base="OTHER" /note="2'-fluoro-nucleotide"
  modified_base 7..7: /mod_base="OTHER" /note="2'-OMe-nucleotide"
  modified_base 8..8: /mod_base="OTHER" /note="2'-fluoro-nucleotide"
  modified_base 9..9: /mod_base="OTHER" /note="2'-OMe-nucleotide"
  modified_base 10..10: /mod_base="OTHER" /note="2'-fluoro-nucleotide"
  modified_base 11..11: /mod_base="OTHER" /note="2'-OMe-nucleotide"
  modified_base 12..12: /mod_base="OTHER" /note="2'-fluoro-nucleotide"
  modified_base 13..13: /mod_base="OTHER" /note="2'-OMe-nucleotide"
  modified_base 14..14: /mod_base="OTHER" /note="2'-fluoro-nucleotide"
  modified_base 15..15: /mod_base="OTHER" /note="2'-OMe-nucleotide"
  modified_base 16..16: /mod_base="OTHER" /note="2'-fluoro-nucleotide"
  modified_base 17..17: /mod_base="OTHER" /note="2'-OMe-nucleotide"
  modified_base 18..18: /mod_base="OTHER" /note="2'-fluoro-nucleotide"
  modified_base 19..19: /mod_base="OTHER" /note="2'-OMe-nucleotide"
  modified_base 20..20: /mod_base="OTHER" /note="2'-fluoro-nucleotide"
  modified_base 21..21: /mod_base="OTHER" /note="2'-OMe-nucleotide"
  modified_base 22..22: /mod_base="OTHER" /note="2'-fluoro-nucleotide"
  modified_base 23..23: /mod_base="OTHER" /note="Inverted nucleotide"
ccaguuaaaggauauagugccct

SEQ ID NO: 553 - DNA, 23 bp, Artificial Sequence
  Description of Artificial Sequence: Synthetic oligonucleotide
  Description of Combined DNA/RNA Molecule: Synthetic oligonucleotide
  N-term hydroxyl group
  C-term hydroxyl group
  modified_base 1..1: /mod_base="OTHER" /note="2'-OMe-nucleotide"
  modified_base 2..2: /mod_base="OTHER" /note="2'-OMe-nucleotide"
  modified_base 3..3: /mod_base="OTHER" /note="2'-OMe-nucleotide"
  modified_base 4..4: /mod_base="OTHER" /note="2'-fluoro-nucleotide"
  modified_base 5..5: /mod_base="OTHER" /note="2'-OMe-nucleotide"
  modified_base 6..6: /mod_base="OTHER" /note="2'-fluoro-nucleotide"
  modified_base 7..7: /mod_base="OTHER" /note="2'-OMe-nucleotide"
  modified_base 8..8: /mod_base="OTHER" /note="2'-fluoro-nucleotide"
  modified_base 9..9: /mod_base="OTHER" /note="2'-OMe-nucleotide"
  modified_base 10..10: /mod_base="OTHER" /note="2'-fluoro-nucleotide"
  modified_base 11..11: /mod_base="OTHER" /note="2'-OMe-nucleotide"
  modified_base 12..12: /mod_base="OTHER" /note="2'-fluoro-nucleotide"
  modified_base 13..13: /mod_base="OTHER" /note="2'-OMe-nucleotide"
  modified_base 14..14: /mod_base="OTHER" /note="2'-fluoro-nucleotide"
  modified_base 15..15: /mod_base="OTHER" /note="2'-OMe-nucleotide"
  modified_base 16..16: /mod_base="OTHER" /note="2'-fluoro-nucleotide"
  modified_base 17..17: /mod_base="OTHER" /note="2'-OMe-nucleotide"
  modified_base 18..18: /mod_base="OTHER" /note="2'-fluoro-nucleotide"
  modified_base 19..19: /mod_base="OTHER" /note="2'-OMe-nucleotide"
  modified_base 20..20: /mod_base="OTHER" /note="2'-fluoro-nucleotide"
  modified_base 21..21: /mod_base="OTHER" /note="2'-OMe-nucleotide"
  modified_base 22..22: /mod_base="OTHER" /note="2'-fluoro-nucleotide"
  modified_base 23..23: /mod_base="OTHER" /note="Inverted nucleotide"
ccauuaaaggauauagugcccat

SEQ ID NO: 554 - DNA, 23 bp, Artificial Sequence
  Description of Artificial Sequence: Synthetic oligonucleotide
  Description of Combined DNA/RNA Molecule: Synthetic oligonucleotide
  N-term hydroxyl group
  C-term hydroxyl group
  modified_base 1..1: /mod_base="OTHER" /note="2'-OMe-nucleotide"
  modified_base 2..2: /mod_base="OTHER" /note="2'-OMe-nucleotide"
  modified_base 3..3: /mod_base="OTHER" /note="2'-OMe-nucleotide"
  modified_base 4..4: /mod_base="OTHER" /note="2'-fluoro-nucleotide"
  modified_base 5..5: /mod_base="OTHER" /note="2'-OMe-nucleotide"
  modified_base 6..6: /mod_base="OTHER" /note="2'-fluoro-nucleotide"
  modified_base 7..7: /mod_base="OTHER" /note="2'-OMe-nucleotide"
  modified_base 8..8: /mod_base="OTHER" /note="2'-fluoro-nucleotide"
  modified_base 9..9: /mod_base="OTHER" /note="2'-OMe-nucleotide"
  modified_base 10..10: /mod_base="OTHER" /note="2'-fluoro-nucleotide"
  modified_base 11..11: /mod_base="OTHER" /note="2'-OMe-nucleotide"
  modified_base 12..12: /mod_base="OTHER" /note="2'-fluoro-nucleotide"
  modified_base 13..13: /mod_base="OTHER" /note="2'-OMe-nucleotide"
  modified_base 14..14: /mod_base="OTHER" /note="2'-fluoro-nucleotide"
  modified_base 15..15: /mod_base="OTHER" /note="2'-OMe-nucleotide"
  modified_base 16..16: /mod_base="OTHER" /note="2'-fluoro-nucleotide"
  modified_base 17..17: /mod_base="OTHER" /note="2'-OMe-nucleotide"
  modified_base 18..18: /mod_base="OTHER" /note="2'-fluoro-nucleotide"
  modified_base 19..19: /mod_base="OTHER" /note="2'-OMe-nucleotide"
  modified_base 20..20: /mod_base="OTHER" /note="2'-fluoro-nucleotide"
  modified_base 21..21: /mod_base="OTHER" /note="2'-OMe-nucleotide"
  modified_base 22..22: /mod_base="OTHER" /note="2'-fluoro-nucleotide"
  modified_base 23..23: /mod_base="OTHER" /note="Inverted nucleotide"
ccauaaaggauauagugcccaat

SEQ ID NO: 555 - DNA, 23 bp, Artificial Sequence
  Description of Artificial Sequence: Synthetic oligonucleotide
  Description of Combined DNA/RNA Molecule: Synthetic oligonucleotide
  N-term hydroxyl group
  C-term hydroxyl group
  modified_base 1..1: /mod_base="OTHER" /note="2'-OMe-nucleotide"
  modified_base 2..2: /mod_base="OTHER" /note="2'-OMe-nucleotide"
  modified_base 3..3: /mod_base="OTHER" /note="2'-OMe-nucleotide"
  modified_base 4..4: /mod_base="OTHER" /note="2'-fluoro-nucleotide"
  modified_base 5..5: /mod_base="OTHER" /note="2'-OMe-nucleotide"
  modified_base 6..6: /mod_base="OTHER" /note="2'-fluoro-nucleotide"
  modified_base 7..7: /mod_base="OTHER" /note="2'-OMe-nucleotide"
  modified_base 8..8: /mod_base="OTHER" /note="2'-fluoro-nucleotide"
  modified_base 9..9: /mod_base="OTHER" /note="2'-OMe-nucleotide"
  modified_base 10..10: /mod_base="OTHER" /note="2'-fluoro-nucleotide"
  modified_base 11..11: /mod_base="OTHER" /note="2'-OMe-nucleotide"
  modified_base 12..12: /mod_base="OTHER" /note="2'-fluoro-nucleotide"
  modified_base 13..13: /mod_base="OTHER" /note="2'-OMe-nucleotide"
  modified_base 14..14: /mod_base="OTHER" /note="2'-fluoro-nucleotide"
  modified_base 15..15: /mod_base="OTHER" /note="2'-OMe-nucleotide"
  modified_base 16..16: /mod_base="OTHER" /note="2'-fluoro-nucleotide"
  modified_base 17..17: /mod_base="OTHER" /note="2'-OMe-nucleotide"
  modified_base 18..18: /mod_base="OTHER" /note="2'-fluoro-nucleotide"
  modified_base 19..19: /mod_base="OTHER" /note="2'-OMe-nucleotide"
  modified_base 20..20: /mod_base="OTHER" /note="2'-fluoro-nucleotide"
  modified_base 21..21: /mod_base="OTHER" /note="2'-OMe-nucleotide"
  modified_base 22..22: /mod_base="OTHER" /note="2'-fluoro-nucleotide"
  modified_base 23..23: /mod_base="OTHER" /note="Inverted nucleotide"
ccaaggauauagugcccaaguut

SEQ ID NO: 556 - DNA, 23 bp, Artificial Sequence
  Description of Artificial Sequence: Synthetic oligonucleotide
  Description of Combined DNA/RNA Molecule: Synthetic oligonucleotide
  N-term hydroxyl group
  C-term hydroxyl group
  modified_base 1..1: /mod_base="OTHER" /note="2'-OMe-nucleotide"
  modified_base 2..2: /mod_base="OTHER" /note="2'-OMe-nucleotide"
  modified_base 3..3: /mod_base="OTHER" /note="2'-OMe-nucleotide"
  modified_base 4..4: /mod_base="OTHER" /note="2'-fluoro-nucleotide"
  modified_base 5..5: /mod_base="OTHER" /note="2'-OMe-nucleotide"
  modified_base 6..6: /mod_base="OTHER" /note="2'-fluoro-nucleotide"
  modified_base 7..7: /mod_base="OTHER" /note="2'-OMe-nucleotide"
  modified_base 8..8: /mod_base="OTHER" /note="2'-fluoro-nucleotide"
  modified_base 9..9: /mod_base="OTHER" /note="2'-OMe-nucleotide"
  modified_base 10..10: /mod_base="OTHER" /note="2'-fluoro-nucleotide"
  modified_base 11..11: /mod_base="OTHER" /note="2'-OMe-nucleotide"
  modified_base 12..12: /mod_base="OTHER" /note="2'-fluoro-nucleotide"
  modified_base 13..13: /mod_base="OTHER" /note="2'-OMe-nucleotide"
  modified_base 14..14: /mod_base="OTHER" /note="2'-fluoro-nucleotide"
  modified_base 15..15: /mod_base="OTHER" /note="2'-OMe-nucleotide"
  modified_base 16..16: /mod_base="OTHER" /note="2'-fluoro-nucleotide"
  modified_base 17..17: /mod_base="OTHER" /note="2'-OMe-nucleotide"
  modified_base 18..18: /mod_base="OTHER" /note="2'-fluoro-nucleotide"
  modified_base 19..19: /mod_base="OTHER" /note="2'-OMe-nucleotide"
  modified_base 20..20: /mod_base="OTHER" /note="2'-fluoro-nucleotide"
  modified_base 21..21: /mod_base="OTHER" /note="2'-OMe-nucleotide"
  modified_base 22..22: /mod_base="OTHER" /note="2'-fluoro-nucleotide"
  modified_base 23..23: /mod_base="OTHER" /note="Inverted nucleotide"
ccaggauauagugcccaaguuat

SEQ ID NO: 557 - DNA, 23 bp, Artificial Sequence
  Description of Artificial Sequence: Synthetic oligonucleotide
  Description of Combined DNA/RNA Molecule: Synthetic oligonucleotide
  N-term hydroxyl group
  C-term hydroxyl group
  modified_base 1..1: /mod_base="OTHER" /note="2'-OMe-nucleotide"
  modified_base 2..2: /mod_base="OTHER" /note="2'-OMe-nucleotide"
  modified_base 3..3: /mod_base="OTHER" /note="2'-OMe-nucleotide"
  modified_base 4..4: /mod_base="OTHER" /note="2'-fluoro-nucleotide"
  modified_base 5..5: /mod_base="OTHER" /note="2'-OMe-nucleotide"
  modified_base 6..6: /mod_base="OTHER" /note="2'-fluoro-nucleotide"
  modified_base 7..7: /mod_base="OTHER" /note="2'-OMe-nucleotide"
  modified_base 8..8: /mod_base="OTHER" /note="2'-fluoro-nucleotide"
  modified_base 9..9: /mod_base="OTHER" /note="2'-OMe-nucleotide"
  modified_base 10..10: /mod_base="OTHER" /note="2'-fluoro-nucleotide"
  modified_base 11..11: /mod_base="OTHER" /note="2'-OMe-nucleotide"
  modified_base 12..12: /mod_base="OTHER" /note="2'-fluoro-nucleotide"
  modified_base 13..13: /mod_base="OTHER" /note="2'-OMe-nucleotide"
  modified_base 14..14: /mod_base="OTHER" /note="2'-fluoro-nucleotide"
  modified_base 15..15: /mod_base="OTHER" /note="2'-OMe-nucleotide"
  modified_base 16..16: /mod_base="OTHER" /note="2'-fluoro-nucleotide"
  modified_base 17..17: /mod_base="OTHER" /note="2'-OMe-nucleotide"
  modified_base 18..18: /mod_base="OTHER" /note="2'-fluoro-nucleotide"
  modified_base 19..19: /mod_base="OTHER" /note="2'-OMe-nucleotide"
  modified_base 20..20: /mod_base="OTHER" /note="2'-fluoro-nucleotide"
  modified_base 21..21: /mod_base="OTHER" /note="2'-OMe-nucleotide"
  modified_base 22..22: /mod_base="OTHER" /note="2'-fluoro-nucleotide"
  modified_base 23..23: /mod_base="OTHER" /note="Inverted nucleotide"
ccagauauagugcccaaguuaut

SEQ ID NO: 558 - DNA, 23 bp, Artificial Sequence
  Description of Artificial Sequence: Synthetic oligonucleotide
  Description of Combined DNA/RNA Molecule: Synthetic oligonucleotide
  N-term hydroxyl group
  C-term hydroxyl group
  modified_base 1..1: /mod_base="OTHER" /note="2'-OMe-nucleotide"
  modified_base 2..2: /mod_base="OTHER" /note="2'-OMe-nucleotide"
  modified_base 3..3: /mod_base="OTHER" /note="2'-OMe-nucleotide"
  modified_base 4..4: /mod_base="OTHER" /note="2'-fluoro-nucleotide"
  modified_base 5..5: /mod_base="OTHER" /note="2'-OMe-nucleotide"
  modified_base 6..6: /mod_base="OTHER" /note="2'-fluoro-nucleotide"
  modified_base 7..7: /mod_base="OTHER" /note="2'-OMe-nucleotide"
  modified_base 8..8: /mod_base="OTHER" /note="2'-fluoro-nucleotide"
  modified_base 9..9: /mod_base="OTHER" /note="2'-OMe-nucleotide"
  modified_base 10..10: /mod_base="OTHER" /note="2'-fluoro-nucleotide"
  modified_base 11..11: /mod_base="OTHER" /note="2'-OMe-nucleotide"
  modified_base 12..12: /mod_base="OTHER" /note="2'-fluoro-nucleotide"
  modified_base 13..13: /mod_base="OTHER" /note="2'-OMe-nucleotide"
  modified_base 14..14: /mod_base="OTHER" /note="2'-fluoro-nucleotide"
  modified_base 15..15: /mod_base="OTHER" /note="2'-OMe-nucleotide"
  modified_base 16..16: /mod_base="OTHER" /note="2'-fluoro-nucleotide"
  modified_base 17..17: /mod_base="OTHER" /note="2'-OMe-nucleotide"
  modified_base 18..18: /mod_base="OTHER" /note="2'-fluoro-nucleotide"
  modified_base 19..19: /mod_base="OTHER" /note="2'-OMe-nucleotide"
  modified_base 20..20: /mod_base="OTHER" /note="2'-fluoro-nucleotide"
  modified_base 21..21: /mod_base="OTHER" /note="2'-OMe-nucleotide"
  modified_base 22..22: /mod_base="OTHER" /note="2'-fluoro-nucleotide"
  modified_base 23..23: /mod_base="OTHER" /note="Inverted nucleotide"
ccaauauagugcccaaguuauat

SEQ ID NO: 559 - DNA, 23 bp, Artificial Sequence
  Description of Artificial Sequence: Synthetic oligonucleotide
  Description of Combined DNA/RNA Molecule: Synthetic oligonucleotide
  N-term hydroxyl group
  C-term hydroxyl group
  modified_base 1..1: /mod_base="OTHER" /note="2'-OMe-nucleotide"
  modified_base 2..2: /mod_base="OTHER" /note="2'-OMe-nucleotide"
  modified_base 3..3: /mod_base="OTHER" /note="2'-OMe-nucleotide"
  modified_base 4..4: /mod_base="OTHER" /note="2'-fluoro-nucleotide"
  modified_base 5..5: /mod_base="OTHER" /note="2'-OMe-nucleotide"
  modified_base 6..6: /mod_base="OTHER" /note="2'-fluoro-nucleotide"
  modified_base 7..7: /mod_base="OTHER" /note="2'-OMe-nucleotide"
  modified_base 8..8: /mod_base="OTHER" /note="2'-fluoro-nucleotide"
  modified_base 9..9: /mod_base="OTHER" /note="2'-OMe-nucleotide"
  modified_base 10..10: /mod_base="OTHER" /note="2'-fluoro-nucleotide"
  modified_base 11..11: /mod_base="OTHER" /note="2'-OMe-nucleotide"
  modified_base 12..12: /mod_base="OTHER" /note="2'-fluoro-nucleotide"
  modified_base 13..13: /mod_base="OTHER" /note="2'-OMe-nucleotide"
  modified_base 14..14: /mod_base="OTHER" /note="2'-fluoro-nucleotide"
  modified_base 15..15: /mod_base="OTHER" /note="2'-OMe-nucleotide"
  modified_base 16..16: /mod_base="OTHER" /note="2'-fluoro-nucleotide"
  modified_base 17..17: /mod_base="OTHER" /note="2'-OMe-nucleotide"
  modified_base 18..18: /mod_base="OTHER" /note="2'-fluoro-nucleotide"
  modified_base 19..19: /mod_base="OTHER" /note="2'-OMe-nucleotide"
  modified_base 20..20: /mod_base="OTHER" /note="2'-fluoro-nucleotide"
  modified_base 21..21: /mod_base="OTHER" /note="2'-OMe-nucleotide"
  modified_base 22..22: /mod_base="OTHER" /note="2'-fluoro-nucleotide"
  modified_base 23..23: /mod_base="OTHER" /note="Inverted nucleotide"
ccaggugaccuaccuuugucaat

SEQ ID NO: 560 - DNA, 23 bp, Artificial Sequence
  Description of Artificial Sequence: Synthetic oligonucleotide
  Description of Combined DNA/RNA Molecule: Synthetic oligonucleotide
  N-term hydroxyl group
  C-term hydroxyl group
  modified_base 1..1: /mod_base="OTHER" /note="2'-OMe-nucleotide"
  modified_base 2..2: /mod_base="OTHER" /note="2'-OMe-nucleotide"
  modified_base 3..3: /mod_base="OTHER" /note="2'-OMe-nucleotide"
  modified_base 4..4: /mod_base="OTHER" /note="2'-fluoro-nucleotide"
  modified_base 5..5: /mod_base="OTHER" /note="2'-OMe-nucleotide"
  modified_base 6..6: /mod_base="OTHER" /note="2'-fluoro-nucleotide"
  modified_base 7..7: /mod_base="OTHER" /note="2'-OMe-nucleotide"
  modified_base 8..8: /mod_base="OTHER" /note="2'-fluoro-nucleotide"
  modified_base 9..9: /mod_base="OTHER" /note="2'-OMe-nucleotide"
  modified_base 10..10: /mod_base="OTHER" /note="2'-fluoro-nucleotide"
  modified_base 11..11: /mod_base="OTHER" /note="2'-OMe-nucleotide"
  modified_base 12..12: /mod_base="OTHER" /note="2'-fluoro-nucleotide"
  modified_base 13..13: /mod_base="OTHER" /note="2'-OMe-nucleotide"
  modified_base 14..14: /mod_base="OTHER" /note="2'-fluoro-nucleotide"
  modified_base 15..15: /mod_base="OTHER" /note="2'-OMe-nucleotide"
  modified_base 16..16: /mod_base="OTHER" /note="2'-fluoro-nucleotide"
  modified_base 17..17: /mod_base="OTHER" /note="2'-OMe-nucleotide"
  modified_base 18..18: /mod_base="OTHER" /note="2'-fluoro-nucleotide"
  modified_base 19..19: /mod_base="OTHER" /note="2'-OMe-nucleotide"
  modified_base 20..20: /mod_base="OTHER" /note="2'-fluoro-nucleotide"
  modified_base 21..21: /mod_base="OTHER" /note="2'-OMe-nucleotide"
  modified_base 22..22: /mod_base="OTHER" /note="2'-fluoro-nucleotide"
  modified_base 23..23: /mod_base="OTHER" /note="Inverted nucleotide"
ccagugaccuaccuuugucaaut

SEQ ID NO: 561 - DNA, 23 bp, Artificial Sequence
  Description of Artificial Sequence: Synthetic oligonucleotide
  Description of Combined DNA/RNA Molecule: Synthetic oligonucleotide
  N-term hydroxyl group
  C-term hydroxyl group
  modified_base 1..1: /mod_base="OTHER" /note="2'-OMe-nucleotide"
  modified_base 2..2: /mod_base="OTHER" /note="2'-OMe-nucleotide"
  modified_base 3..3: /mod_base="OTHER" /note="2'-OMe-nucleotide"
  modified_base 4..4: /mod_base="OTHER" /note="2'-fluoro-nucleotide"
  modified_base 5..5: /mod_base="OTHER" /note="2'-OMe-nucleotide"
  modified_base 6..6: /mod_base="OTHER" /note="2'-fluoro-nucleotide"
  modified_base 7..7: /mod_base="OTHER" /note="2'-OMe-nucleotide"
  modified_base 8..8: /mod_base="OTHER" /note="2'-fluoro-nucleotide"
  modified_base 9..9: /mod_base="OTHER" /note="2'-OMe-nucleotide"
  modified_base 10..10: /mod_base="OTHER" /note="2'-fluoro-nucleotide"
  modified_base 11..11: /mod_base="OTHER" /note="2'-OMe-nucleotide"
  modified_base 12..12: /mod_base="OTHER" /note="2'-fluoro-nucleotide"
  modified_base 13..13: /mod_base="OTHER" /note="2'-OMe-nucleotide"
  modified_base 14..14: /mod_base="OTHER" /note="2'-fluoro-nucleotide"
  modified_base 15..15: /mod_base="OTHER" /note="2'-OMe-nucleotide"
  modified_base 16..16: /mod_base="OTHER" /note="2'-fluoro-nucleotide"
  modified_base 17..17: /mod_base="OTHER" /note="2'-OMe-nucleotide"
  modified_base 18..18: /mod_base="OTHER" /note="2'-fluoro-nucleotide"
  modified_base 19..19: /mod_base="OTHER" /note="2'-OMe-nucleotide"
  modified_base 20..20: /mod_base="OTHER" /note="2'-fluoro-nucleotide"
  modified_base 21..21: /mod_base="OTHER" /note="2'-OMe-nucleotide"
  modified_base 22..22: /mod_base="OTHER" /note="2'-fluoro-nucleotide"
  modified_base 23..23: /mod_base="OTHER" /note="Inverted nucleotide"
ccaugaccuaccuuugucaauat

SEQ ID NO: 562 - DNA, 23 bp, Artificial Sequence
  Description of Artificial Sequence: Synthetic oligonucleotide
  Description of Combined DNA/RNA Molecule: Synthetic oligonucleotide
  N-term hydroxyl group
  C-term hydroxyl group
  modified_base 1..1: /mod_base="OTHER" /note="2'-OMe-nucleotide"
  modified_base 2..2: /mod_base="OTHER" /note="2'-OMe-nucleotide"
  modified_base 3..3: /mod_base="OTHER" /note="2'-OMe-nucleotide"
  modified_base 4..4: /mod_base="OTHER" /note="2'-fluoro-nucleotide"
  modified_base 5..5: /mod_base="OTHER" /note="2'-OMe-nucleotide"
  modified_base 6..6: /mod_base="OTHER" /note="2'-fluoro-nucleotide"
  modified_base 7..7: /mod_base="OTHER" /note="2'-OMe-nucleotide"
  modified_base 8..8: /mod_base="OTHER" /note="2'-fluoro-nucleotide"
  modified_base 9..9: /mod_base="OTHER" /note="2'-OMe-nucleotide"
  modified_base 10..10: /mod_base="OTHER" /note="2'-fluoro-nucleotide"
  modified_base 11..11: /mod_base="OTHER" /note="2'-OMe-nucleotide"
  modified_base 12..12: /mod_base="OTHER" /note="2'-fluoro-nucleotide"
  modified_base 13..13: /mod_base="OTHER" /note="2'-OMe-nucleotide"
  modified_base 14..14: /mod_base="OTHER" /note="2'-fluoro-nucleotide"
  modified_base 15..15: /mod_base="OTHER" /note="2'-OMe-nucleotide"
  modified_base 16..16: /mod_base="OTHER" /note="2'-fluoro-nucleotide"
  modified_base 17..17: /mod_base="OTHER" /note="2'-OMe-nucleotide"
  modified_base 18..18: /mod_base="OTHER" /note="2'-fluoro-nucleotide"
  modified_base 19..19: /mod_base="OTHER" /note="2'-OMe-nucleotide"
  modified_base 20..20: /mod_base="OTHER" /note="2'-fluoro-nucleotide"
  modified_base 21..21: /mod_base="OTHER" /note="2'-OMe-nucleotide"
  modified_base 22..22: /mod_base="OTHER" /note="2'-fluoro-nucleotide"
  modified_base 23..23: /mod_base="OTHER" /note="Inverted nucleotide"
ccaauguauuucaaauuauccat

SEQ ID NO: 563 - DNA, 23 bp, Artificial Sequence
  Description of Artificial Sequence: Synthetic oligonucleotide
  Description of Combined DNA/RNA Molecule: Synthetic oligonucleotide
  N-term hydroxyl group
  C-term hydroxyl group
  modified_base 1..1: /mod_base="OTHER" /note="2'-OMe-nucleotide"
  modified_base 2..2: /mod_base="OTHER" /note="2'-OMe-nucleotide"
  modified_base 3..3: /mod_base="OTHER" /note="2'-OMe-nucleotide"
  modified_base 4..4: /mod_base="OTHER" /note="2'-fluoro-nucleotide"
  modified_base 5..5: /mod_base="OTHER" /note="2'-OMe-nucleotide"
  modified_base 6..6: /mod_base="OTHER" /note="2'-fluoro-nucleotide"
  modified_base 7..7: /mod_base="OTHER" /note="2'-OMe-nucleotide"
  modified_base 8..8: /mod_base="OTHER" /note="2'-fluoro-nucleotide"
  modified_base 9..9: /mod_base="OTHER" /note="2'-OMe-nucleotide"
  modified_base 10..10: /mod_base="OTHER" /note="2'-fluoro-nucleotide"
  modified_base 11..11: /mod_base="OTHER" /note="2'-OMe-nucleotide"
  modified_base 12..12: /mod_base="OTHER" /note="2'-fluoro-nucleotide"
  modified_base 13..13: /mod_base="OTHER" /note="2'-OMe-nucleotide"
  modified_base 14..14: /mod_base="OTHER" /note="2'-fluoro-nucleotide"
  modified_base 15..15: /mod_base="OTHER" /note="2'-OMe-nucleotide"
  modified_base 16..16: /mod_base="OTHER" /note="2'-fluoro-nucleotide"
  modified_base 17..17: /mod_base="OTHER" /note="2'-OMe-nucleotide"
  modified_base 18..18: /mod_base="OTHER" /note="2'-fluoro-nucleotide"
  modified_base 19..19: /mod_base="OTHER" /note="2'-OMe-nucleotide"
  modified_base 20..20: /mod_base="OTHER" /note="2'-fluoro-nucleotide"
  modified_base 21..21: /mod_base="OTHER" /note="2'-OMe-nucleotide"
  modified_base 22..22: /mod_base="OTHER" /note="2'-fluoro-nucleotide"
  modified_base 23..23: /mod_base="OTHER" /note="Inverted nucleotide"
ccauucaaauuauccaauauact

SEQ ID NO: 564 - DNA, 23 bp, Artificial Sequence
  Description of Artificial Sequence: Synthetic oligonucleotide
  Description of Combined DNA/RNA Molecule: Synthetic oligonucleotide
  N-term hydroxyl group
  C-term hydroxyl group
  modified_base 1..1: /mod_base="OTHER" /note="2'-OMe-nucleotide"
  modified_base 2..2: /mod_base="OTHER" /note="2'-OMe-nucleotide"
  modified_base 3..3: /mod_base="OTHER" /note="2'-OMe-nucleotide"
  modified_base 4..4: /mod_base="OTHER" /note="2'-fluoro-nucleotide"
  modified_base 5..5: /mod_base="OTHER" /note="2'-OMe-nucleotide"
  modified_base 6..6: /mod_base="OTHER" /note="2'-fluoro-nucleotide"
  modified_base 7..7: /mod_base="OTHER" /note="2'-OMe-nucleotide"
  modified_base 8..8: /mod_base="OTHER" /note="2'-fluoro-nucleotide"
  modified_base 9..9: /mod_base="OTHER" /note="2'-OMe-nucleotide"
  modified_base 10..10: /mod_base="OTHER" /note="2'-fluoro-nucleotide"
  modified_base 11..11: /mod_base="OTHER" /note="2'-OMe-nucleotide"
  modified_base 12..12: /mod_base="OTHER" /note="2'-fluoro-nucleotide"
  modified_base 13..13: /mod_base="OTHER" /note="2'-OMe-nucleotide"
  modified_base 14..14: /mod_base="OTHER" /note="2'-fluoro-nucleotide"
  modified_base 15..15: /mod_base="OTHER" /note="2'-OMe-nucleotide"
  modified_base 16..16: /mod_base="OTHER" /note="2'-fluoro-nucleotide"
  modified_base 17..17: /mod_base="OTHER" /note="2'-OMe-nucleotide"
  modified_base 18..18: /mod_base="OTHER" /note="2'-fluoro-nucleotide"
  modified_base 19..19: /mod_base="OTHER" /note="2'-OMe-nucleotide"
  modified_base 20..20: /mod_base="OTHER" /note="2'-fluoro-nucleotide"
  modified_base 21..21: /mod_base="OTHER" /note="2'-OMe-nucleotide"
  modified_base 22..22: /mod_base="OTHER" /note="2'-fluoro-nucleotide"
  modified_base 23..23: /mod_base="OTHER" /note="Inverted nucleotide"
ccaucaaauuauccaauauacat

SEQ ID NO: 565 - DNA, 23 bp, Artificial Sequence
  Description of Artificial Sequence: Synthetic oligonucleotide
  Description of Combined DNA/RNA Molecule: Synthetic oligonucleotide
  N-term hydroxyl group
  C-term hydroxyl group
  modified_base 1..1: /mod_base="OTHER" /note="2'-OMe-nucleotide"
  modified_base 2..2: /mod_base="OTHER" /note="2'-OMe-nucleotide"
  modified_base 3..3: /mod_base="OTHER" /note="2'-OMe-nucleotide"
  modified_base 4..4: /mod_base="OTHER" /note="2'-fluoro-nucleotide"
  modified_base 5..5: /mod_base="OTHER" /note="2'-OMe-nucleotide"
  modified_base 6..6: /mod_base="OTHER" /note="2'-fluoro-nucleotide"
  modified_base 7..7: /mod_base="OTHER" /note="2'-OMe-nucleotide"
  modified_base 8..8: /mod_base="OTHER" /note="2'-fluoro-nucleotide"
  modified_base 9..9: /mod_base="OTHER" /note="2'-OMe-nucleotide"
  modified_base 10..10: /mod_base="OTHER" /note="2'-fluoro-nucleotide"
  modified_base 11..11: /mod_base="OTHER" /note="2'-OMe-nucleotide"
  modified_base 12..12: /mod_base="OTHER" /note="2'-fluoro-nucleotide"
  modified_base 13..13: /mod_base="OTHER" /note="2'-OMe-nucleotide"
  modified_base 14..14: /mod_base="OTHER" /note="2'-fluoro-nucleotide"
  modified_base 15..15: /mod_base="OTHER" /note="2'-OMe-nucleotide"
  modified_base 16..16: /mod_base="OTHER" /note="2'-fluoro-nucleotide"
  modified_base 17..17: /mod_base="OTHER" /note="2'-OMe-nucleotide"
  modified_base 18..18: /mod_base="OTHER" /note="2'-fluoro-nucleotide"
  modified_base 19..19: /mod_base="OTHER" /note="2'-OMe-nucleotide"
  modified_base 20..20: /mod_base="OTHER" /note="2'-fluoro-nucleotide"
  modified_base 21..21: /mod_base="OTHER" /note="2'-OMe-nucleotide"
  modified_base 22..22: /mod_base="OTHER" /note="2'-fluoro-nucleotide"
  modified_base 23..23: /mod_base="OTHER" /note="Inverted nucleotide"
ccaauuauccaauauacauguct

SEQ ID NO: 566 - DNA, 23 bp, Artificial Sequence
  Description of Artificial Sequence: Synthetic oligonucleotide
  Description of Combined DNA/RNA Molecule: Synthetic oligonucleotide
  N-term hydroxyl group
  C-term hydroxyl group
  modified_base 1..1: /mod_base="OTHER" /note="2'-OMe-nucleotide"
  modified_base 2..2: /mod_base="OTHER" /note="2'-OMe-nucleotide"
  modified_base 3..3: /mod_base="OTHER" /note="2'-OMe-nucleotide"
  modified_base 4..4: /mod_base="OTHER" /note="2'-fluoro-nucleotide"
  modified_base 5..5: /mod_base="OTHER" /note="2'-OMe-nucleotide"
  modified_base 6..6: /mod_base="OTHER" /note="2'-fluoro-nucleotide"
  modified_base 7..7: /mod_base="OTHER" /note="2'-OMe-nucleotide"
  modified_base 8..8: /mod_base="OTHER" /note="2'-fluoro-nucleotide"
  modified_base 9..9: /mod_base="OTHER" /note="2'-OMe-nucleotide"
  modified_base 10..10: /mod_base="OTHER" /note="2'-fluoro-nucleotide"
  modified_base 11..11: /mod_base="OTHER" /note="2'-OMe-nucleotide"
  modified_base 12..12: /mod_base="OTHER" /note="2'-fluoro-nucleotide"
  modified_base 13..13: /mod_base="OTHER" /note="2'-OMe-nucleotide"
  modified_base 14..14: /mod_base="OTHER" /note="2'-fluoro-nucleotide"
  modified_base 15..15: /mod_base="OTHER" /note="2'-OMe-nucleotide"
  modified_base 16..16: /mod_base="OTHER" /note="2'-fluoro-nucleotide"
  modified_base 17..17: /mod_base="OTHER" /note="2'-OMe-nucleotide"
  modified_base 18..18: /mod_base="OTHER" /note="2'-fluoro-nucleotide"
  modified_base 19..19: /mod_base="OTHER" /note="2'-OMe-nucleotide"
  modified_base 20..20: /mod_base="OTHER" /note="2'-fluoro-nucleotide"
  modified_base 21..21: /mod_base="OTHER" /note="2'-OMe-nucleotide"
  modified_base 22..22: /mod_base="OTHER" /note="2'-fluoro-nucleotide"
  modified_base 23..23: /mod_base="OTHER" /note="Inverted nucleotide"
ccauuauccaauauacaugucat

SEQ ID NO: 567 - DNA, 23 bp, Artificial Sequence
  Description of Artificial Sequence: Synthetic oligonucleotide
  Description of Combined DNA/RNA Molecule: Synthetic oligonucleotide
  N-term hydroxyl group
  C-term hydroxyl group
  modified_base 1..1: /mod_base="OTHER" /note="2'-OMe-nucleotide"
  modified_base 2..2: /mod_base="OTHER" /note="2'-OMe-nucleotide"
  modified_base 3..3: /mod_base="OTHER" /note="2'-OMe-nucleotide"
  modified_base 4..4: /mod_base="OTHER" /note="2'-fluoro-nucleotide"
  modified_base 5..5: /mod_base="OTHER" /note="2'-OMe-nucleotide"
  modified_base 6..6: /mod_base="OTHER" /note="2'-fluoro-nucleotide"
  modified_base 7..7: /mod_base="OTHER" /note="2'-OMe-nucleotide"
  modified_base 8..8: /mod_base="OTHER" /note="2'-fluoro-nucleotide"
  modified_base 9..9: /mod_base="OTHER" /note="2'-OMe-nucleotide"
  modified_base 10..10: /mod_base="OTHER" /note="2'-fluoro-nucleotide"
  modified_base 11..11: /mod_base="OTHER" /note="2'-OMe-nucleotide"
  modified_base 12..12: /mod_base="OTHER" /note="2'-fluoro-nucleotide"
  modified_base 13..13: /mod_base="OTHER" /note="2'-OMe-nucleotide"
  modified_base 14..14: /mod_base="OTHER" /note="2'-fluoro-nucleotide"
  modified_base 15..15: /mod_base="OTHER" /note="2'-OMe-nucleotide"
  modified_base 16..16: /mod_base="OTHER" /note="2'-fluoro-nucleotide"
  modified_base 17..17: /mod_base="OTHER" /note="2'-OMe-nucleotide"
  modified_base 18..18: /mod_base="OTHER" /note="2'-fluoro-nucleotide"
  modified_base 19..19: /mod_base="OTHER" /note="2'-OMe-nucleotide"
  modified_base 20..20: /mod_base="OTHER" /note="2'-fluoro-nucleotide"
  modified_base 21..21: /mod_base="OTHER" /note="2'-OMe-nucleotide"
  modified_base 22..22: /mod_base="OTHER" /note="2'-fluoro-nucleotide"
  modified_base 23..23: /mod_base="OTHER" /note="Inverted nucleotide"
ccauauccaauauacaugucaut

SEQ ID NO: 568 - DNA, 23 bp, Artificial Sequence
  Description of Artificial Sequence: Synthetic oligonucleotide
  Description of Combined DNA/RNA Molecule: Synthetic oligonucleotide
  N-term hydroxyl group
  C-term hydroxyl group
  modified_base 1..1: /mod_base="OTHER" /note="2'-OMe-nucleotide"
  modified_base 2..2: /mod_base="OTHER" /note="2'-OMe-nucleotide"
  modified_base 3..3: /mod_base="OTHER" /note="2'-OMe-nucleotide"
  modified_base 4..4: /mod_base="OTHER" /note="2'-fluoro-nucleotide"
  modified_base 5..5: /mod_base="OTHER" /note="2'-OMe-nucleotide"
  modified_base 6..6: /mod_base="OTHER" /note="2'-fluoro-nucleotide"
  modified_base 7..7: /mod_base="OTHER" /note="2'-OMe-nucleotide"
  modified_base 8..8: /mod_base="OTHER" /note="2'-fluoro-nucleotide"
  modified_base 9..9: /mod_base="OTHER" /note="2'-OMe-nucleotide"
  modified_base 10..10: /mod_base="OTHER" /note="2'-fluoro-nucleotide"
  modified_base 11..11: /mod_base="OTHER" /note="2'-OMe-nucleotide"
  modified_base 12..12: /mod_base="OTHER" /note="2'-fluoro-nucleotide"
  modified_base 13..13: /mod_base="OTHER" /note="2'-OMe-nucleotide"
  modified_base 14..14: /mod_base="OTHER" /note="2'-fluoro-nucleotide"
  modified_base 15..15: /mod_base="OTHER" /note="2'-OMe-nucleotide"
  modified_base 16..16: /mod_base="OTHER" /note="2'-fluoro-nucleotide"
  modified_base 17..17: /mod_base="OTHER" /note="2'-OMe-nucleotide"
  modified_base 18..18: /mod_base="OTHER" /note="2'-fluoro-nucleotide"
  modified_base 19..19: /mod_base="OTHER" /note="2'-OMe-nucleotide"
  modified_base 20..20: /mod_base="OTHER" /note="2'-fluoro-nucleotide"
  modified_base 21..21: /mod_base="OTHER" /note="2'-OMe-nucleotide"
  modified_base 22..22: /mod_base="OTHER" /note="2'-fluoro-nucleotide"
  modified_base 23..23: /mod_base="OTHER" /note="Inverted nucleotide"
ccacaugucauauauauuuuuat

SEQ ID NO: 569 - DNA, 23 bp, Artificial Sequence
  Description of Artificial Sequence: Synthetic oligonucleotide
  Description of Combined DNA/RNA Molecule: Synthetic oligonucleotide
  N-term hydroxyl group
  C-term hydroxyl group
  modified_base 1..1: /mod_base="OTHER" /note="2'-OMe-nucleotide"
  modified_base 2..2: /mod_base="OTHER" /note="2'-OMe-nucleotide"
  modified_base 3..3: /mod_base="OTHER" /note="2'-OMe-nucleotide"
  modified_base 4..4: /mod_base="OTHER" /note="2'-fluoro-nucleotide"
  modified_base 5..5: /mod_base="OTHER" /note="2'-OMe-nucleotide"
  modified_base 6..6: /mod_base="OTHER" /note="2'-fluoro-nucleotide"
  modified_base 7..7: /mod_base="OTHER" /note="2'-OMe-nucleotide"
  modified_base 8..8: /mod_base="OTHER" /note="2'-fluoro-nucleotide"
  modified_base 9..9: /mod_base="OTHER" /note="2'-OMe-nucleotide"
  modified_base 10..10: /mod_base="OTHER" /note="2'-fluoro-nucleotide"
  modified_base 11..11: /mod_base="OTHER" /note="2'-OMe-nucleotide"
  modified_base 12..12: /mod_base="OTHER" /note="2'-fluoro-nucleotide"
  modified_base 13..13: /mod_base="OTHER" /note="2'-OMe-nucleotide"
  modified_base 14..14: /mod_base="OTHER" /note="2'-fluoro-nucleotide"
  modified_base 15..15: /mod_base="OTHER" /note="2'-OMe-nucleotide"
  modified_base 16..16: /mod_base="OTHER" /note="2'-fluoro-nucleotide"
  modified_base 17..17: /mod_base="OTHER" /note="2'-OMe-nucleotide"
  modified_base 18..18: /mod_base="OTHER" /note="2'-fluoro-nucleotide"
  modified_base 19..19: /mod_base="OTHER" /note="2'-OMe-nucleotide"
  modified_base 20..20: /mod_base="OTHER" /note="2'-fluoro-nucleotide"
  modified_base 21..21: /mod_base="OTHER" /note="2'-OMe-nucleotide"
  modified_base 22..22: /mod_base="OTHER" /note="2'-fluoro-nucleotide"
  modified_base 23..23: /mod_base="OTHER" /note="Inverted nucleotide"
ccaaguacaaaauaauaaaggut

SEQ ID NO: 570 - DNA, 23 bp, Artificial Sequence
  Description of Artificial Sequence: Synthetic oligonucleotide
  Description of Combined DNA/RNA Molecule: Synthetic oligonucleotide
  N-term hydroxyl group
  C-term hydroxyl group
  modified_base 1..1: /mod_base="OTHER" /note="2'-OMe-nucleotide"
  modified_base 2..2: /mod_base="OTHER" /note="2'-OMe-nucleotide"
  modified_base 3..3: /mod_base="OTHER" /note="2'-OMe-nucleotide"
  modified_base 4..4: /mod_base="OTHER" /note="2'-fluoro-nucleotide"
  modified_base 5..5: /mod_base="OTHER" /note="2'-OMe-nucleotide"
  modified_base 6..6: /mod_base="OTHER" /note="2'-fluoro-nucleotide"
  modified_base 7..7: /mod_base="OTHER" /note="2'-OMe-nucleotide"
  modified_base 8..8: /mod_base="OTHER" /note="2'-fluoro-nucleotide"
  modified_base 9..9: /mod_base="OTHER" /note="2'-OMe-nucleotide"
  modified_base 10..10: /mod_base="OTHER" /note="2'-fluoro-nucleotide"
  modified_base 11..11: /mod_base="OTHER" /note="2'-OMe-nucleotide"
  modified_base 12..12: /mod_base="OTHER" /note="2'-fluoro-nucleotide"
  modified_base 13..13: /mod_base="OTHER" /note="2'-OMe-nucleotide"
  modified_base 14..14: /mod_base="OTHER" /note="2'-fluoro-nucleotide"
  modified_base 15..15: /mod_base="OTHER" /note="2'-OMe-nucleotide"
  modified_base 16..16: /mod_base="OTHER" /note="2'-fluoro-nucleotide"
  modified_base 17..17: /mod_base="OTHER" /note="2'-OMe-nucleotide"
  modified_base 18..18: /mod_base="OTHER" /note="2'-fluoro-nucleotide"
  modified_base 19..19: /mod_base="OTHER" /note="2'-OMe-nucleotide"
  modified_base 20..20: /mod_base="OTHER" /note="2'-fluoro-nucleotide"
  modified_base 21..21: /mod_base="OTHER" /note="2'-OMe-nucleotide"
  modified_base 22..22: /mod_base="OTHER" /note="2'-fluoro-nucleotide"
  modified_base 23..23: /mod_base="OTHER" /note="Inverted nucleotide"
ccaguacaaaauaauaaagguat

SEQ ID NO: 571 - DNA, 23 bp, Artificial Sequence
  Description of Artificial Sequence: Synthetic oligonucleotide
  Description of Combined DNA/RNA Molecule: Synthetic oligonucleotide
  N-term hydroxyl group
  C-term hydroxyl group
  modified_base 1..1: /mod_base="OTHER" /note="2'-OMe-nucleotide"
  modified_base 2..2: /mod_base="OTHER" /note="2'-OMe-nucleotide"
  modified_base 3..3: /mod_base="OTHER" /note="2'-OMe-nucleotide"
  modified_base 4..4: /mod_base="OTHER" /note="2'-fluoro-nucleotide"
  modified_base 5..5: /mod_base="OTHER" /note="2'-OMe-nucleotide"
  modified_base 6..6: /mod_base="OTHER" /note="2'-fluoro-nucleotide"
  modified_base 7..7: /mod_base="OTHER" /note="2'-OMe-nucleotide"
  modified_base 8..8: /mod_base="OTHER" /note="2'-fluoro-nucleotide"
  modified_base 9..9: /mod_base="OTHER" /note="2'-OMe-nucleotide"
  modified_base 10..10: /mod_base="OTHER" /note="2'-fluoro-nucleotide"
  modified_base 11..11: /mod_base="OTHER" /note="2'-OMe-nucleotide"
  modified_base 12..12: /mod_base="OTHER" /note="2'-fluoro-nucleotide"
  modified_base 13..13: /mod_base="OTHER" /note="2'-OMe-nucleotide"
  modified_base 14..14: /mod_base="OTHER" /note="2'-fluoro-nucleotide"
  modified_base 15..15: /mod_base="OTHER" /note="2'-OMe-nucleotide"
  modified_base 16..16: /mod_base="OTHER" /note="2'-fluoro-nucleotide"
  modified_base 17..17: /mod_base="OTHER" /note="2'-OMe-nucleotide"
  modified_base 18..18: /mod_base="OTHER" /note="2'-fluoro-nucleotide"
  modified_base 19..19: /mod_base="OTHER" /note="2'-OMe-nucleotide"
  modified_base 20..20: /mod_base="OTHER" /note="2'-fluoro-nucleotide"
  modified_base 21..21: /mod_base="OTHER" /note="2'-OMe-nucleotide"
  modified_base 22..22: /mod_base="OTHER" /note="2'-fluoro-nucleotide"
  modified_base 23..23: /mod_base="OTHER" /note="Inverted nucleotide"
ccaauaauuuucaggaccacagt

SEQ ID NO: 572 - DNA, 23 bp, Artificial Sequence
  Description of Artificial Sequence: Synthetic oligonucleotide
  Description of Combined DNA/RNA Molecule: Synthetic oligonucleotide
  N-term hydroxyl group
  C-term hydroxyl group
  modified_base 1..1: /mod_base="OTHER" /note="2'-OMe-nucleotide"
  modified_base 2..2: /mod_base="OTHER" /note="2'-OMe-nucleotide"
  modified_base 3..3: /mod_base="OTHER" /note="2'-OMe-nucleotide"
  modified_base 4..4: /mod_base="OTHER" /note="2'-fluoro-nucleotide"
  modified_base 5..5: /mod_base="OTHER" /note="2'-OMe-nucleotide"
  modified_base 6..6: /mod_base="OTHER" /note="2'-fluoro-nucleotide"
  modified_base 7..7: /mod_base="OTHER" /note="2'-OMe-nucleotide"
  modified_base 8..8: /mod_base="OTHER" /note="2'-fluoro-nucleotide"
  modified_base 9..9: /mod_base="OTHER" /note="2'-OMe-nucleotide"
  modified_base 10..10: /mod_base="OTHER" /note="2'-fluoro-nucleotide"
  modified_base 11..11: /mod_base="OTHER" /note="2'-OMe-nucleotide"
  modified_base 12..12: /mod_base="OTHER" /note="2'-fluoro-nucleotide"
  modified_base 13..13: /mod_base="OTHER" /note="2'-OMe-nucleotide"
  modified_base 14..14: /mod_base="OTHER" /note="2'-fluoro-nucleotide"
  modified_base 15..15: /mod_base="OTHER" /note="2'-OMe-nucleotide"
  modified_base 16..16: /mod_base="OTHER" /note="2'-fluoro-nucleotide"
  modified_base 17..17: /mod_base="OTHER" /note="2'-OMe-nucleotide"
  modified_base 18..18: /mod_base="OTHER" /note="2'-fluoro-nucleotide"
  modified_base 19..19: /mod_base="OTHER" /note="2'-OMe-nucleotide"
  modified_base 20..20: /mod_base="OTHER" /note="2'-fluoro-nucleotide"
  modified_base 21..21: /mod_base="OTHER" /note="2'-OMe-nucleotide"
  modified_base 22..22: /mod_base="OTHER" /note="2'-fluoro-nucleotide"
  modified_base 23..23: /mod_base="OTHER" /note="Inverted nucleotide"
ccaaauuuucaggaccacagact

SEQ ID NO: 573 - DNA, 23 bp, Artificial Sequence
  Description of Artificial Sequence: Synthetic oligonucleotide
  Description of Combined DNA/RNA Molecule: Synthetic oligonucleotide
  N-term hydroxyl group
  C-term hydroxyl group
  modified_base 1..1: /mod_base="OTHER" /note="2'-OMe-nucleotide"
  modified_base 2..2: /mod_base="OTHER" /note="2'-OMe-nucleotide"
  modified_base 3..3: /mod_base="OTHER" /note="2'-OMe-nucleotide"
  modified_base 4..4: /mod_base="OTHER" /note="2'-fluoro-nucleotide"
  modified_base 5..5: /mod_base="OTHER" /note="2'-OMe-nucleotide"
  modified_base 6..6: /mod_base="OTHER" /note="2'-fluoro-nucleotide"
  modified_base 7..7: /mod_base="OTHER" /note="2'-OMe-nucleotide"
  modified_base 8..8: /mod_base="OTHER" /note="2'-fluoro-nucleotide"
  modified_base 9..9: /mod_base="OTHER" /note="2'-OMe-nucleotide"
  modified_base 10..10: /mod_base="OTHER" /note="2'-fluoro-nucleotide"
  modified_base 11..11: /mod_base="OTHER" /note="2'-OMe-nucleotide"
  modified_base 12..12: /mod_base="OTHER" /note="2'-fluoro-nucleotide"
  modified_base 13..13: /mod_base="OTHER" /note="2'-OMe-nucleotide"
  modified_base 14..14: /mod_base="OTHER" /note="2'-fluoro-nucleotide"
  modified_base 15..15: /mod_base="OTHER" /note="2'-OMe-nucleotide"
  modified_base 16..16: /mod_base="OTHER" /note="2'-fluoro-nucleotide"
  modified_base 17..17: /mod_base="OTHER" /note="2'-OMe-nucleotide"
  modified_base 18..18: /mod_base="OTHER" /note="2'-fluoro-nucleotide"
  modified_base 19..19: /mod_base="OTHER" /note="2'-OMe-nucleotide"
  modified_base 20..20: /mod_base="OTHER" /note="2'-fluoro-nucleotide"
  modified_base 21..21: /mod_base="OTHER" /note="2'-OMe-nucleotide"
  modified_base 22..22: /mod_base="OTHER" /note="2'-fluoro-nucleotide"
  modified_base 23..23: /mod_base="OTHER" /note="Inverted nucleotide"
ccauuuucaggaccacagacuat

SEQ ID NO: 574 - DNA, 23 bp, Artificial Sequence
  Description of Artificial Sequence: Synthetic oligonucleotide
  Description of Combined DNA/RNA Molecule: Synthetic oligonucleotide
  N-term hydroxyl group
  C-term hydroxyl group
  modified_base 1..1: /mod_base="OTHER" /note="2'-OMe-nucleotide"
  modified_base 2..2: /mod_base="OTHER" /note="2'-OMe-nucleotide"
  modified_base 3..3: /mod_base="OTHER" /note="2'-OMe-nucleotide"
  modified_base 4..4: /mod_base="OTHER" /note="2'-fluoro-nucleotide"
  modified_base 5..5: /mod_base="OTHER" /note="2'-OMe-nucleotide"
  modified_base 6..6: /mod_base="OTHER" /note="2'-fluoro-nucleotide"
  modified_base 7..7: /mod_base="OTHER" /note="2'-OMe-nucleotide"
  modified_base 8..8: /mod_base="OTHER" /note="2'-fluoro-nucleotide"
  modified_base 9..9: /mod_base="OTHER" /note="2'-OMe-nucleotide"
  modified_base 10..10: /mod_base="OTHER" /note="2'-fluoro-nucleotide"
  modified_base 11..11: /mod_base="OTHER" /note="2'-OMe-nucleotide"
  modified_base 12..12: /mod_base="OTHER" /note="2'-fluoro-nucleotide"
  modified_base 13..13: /mod_base="OTHER" /note="2'-OMe-nucleotide"
  modified_base 14..14: /mod_base="OTHER" /note="2'-fluoro-nucleotide"
  modified_base 15..15: /mod_base="OTHER" /note="2'-OMe-nucleotide"
  modified_base 16..16: /mod_base="OTHER" /note="2'-fluoro-nucleotide"
  modified_base 17..17: /mod_base="OTHER" /note="2'-OMe-nucleotide"
  modified_base 18..18: /mod_base="OTHER" /note="2'-fluoro-nucleotide"
  modified_base 19..19: /mod_base="OTHER" /note="2'-OMe-nucleotide"
  modified_base 20..20: /mod_base="OTHER" /note="2'-fluoro-nucleotide"
  modified_base 21..21: /mod_base="OTHER" /note="2'-OMe-nucleotide"
  modified_base 22..22: /mod_base="OTHER" /note="2'-fluoro-nucleotide"
  modified_base 23..23: /mod_base="OTHER" /note="Inverted nucleotide"
ccauuucaggaccacagacuaat

SEQ ID NO: 575 - DNA, 23 bp, Artificial Sequence
  Description of Artificial Sequence: Synthetic oligonucleotide
  Description of Combined DNA/RNA Molecule: Synthetic oligonucleotide
  N-term hydroxyl group
  C-term hydroxyl group
  modified_base 1..1: /mod_base="OTHER" /note="2'-OMe-nucleotide"
  modified_base 2..2: /mod_base="OTHER" /note="2'-OMe-nucleotide"
  modified_base 3..3: /mod_base="OTHER" /note="2'-OMe-nucleotide"
  modified_base 4..4: /mod_base="OTHER" /note="2'-fluoro-nucleotide"
  modified_base 5..5: /mod_base="OTHER" /note="2'-OMe-nucleotide"
  modified_base 6..6: /mod_base="OTHER" /note="2'-fluoro-nucleotide"
  modified_base 7..7: /mod_base="OTHER" /note="2'-OMe-nucleotide"
  modified_base 8..8: /mod_base="OTHER" /note="2'-fluoro-nucleotide"
  modified_base 9..9: /mod_base="OTHER" /note="2'-OMe-nucleotide"
  modified_base 10..10: /mod_base="OTHER" /note="2'-fluoro-nucleotide"
  modified_base 11..11: /mod_base="OTHER" /note="2'-OMe-nucleotide"
  modified_base 12..12: /mod_base="OTHER" /note="2'-fluoro-nucleotide"
  modified_base 13..13: /mod_base="OTHER" /note="2'-OMe-nucleotide"
  modified_base 14..14: /mod_base="OTHER" /note="2'-fluoro-nucleotide"
  modified_base 15..15: /mod_base="OTHER" /note="2'-OMe-nucleotide"
  modified_base 16..16: /mod_base="OTHER" /note="2'-fluoro-nucleotide"
  modified_base 17..17: /mod_base="OTHER" /note="2'-OMe-nucleotide"
  modified_base 18..18: /mod_base="OTHER" /note="2'-fluoro-nucleotide"
  modified_base 19..19: /mod_base="OTHER" /note="2'-OMe-nucleotide"
  modified_base 20..20: /mod_base="OTHER" /note="2'-fluoro-nucleotide"
  modified_base 21..21: /mod_base="OTHER" /note="2'-OMe-nucleotide"
  modified_base 22..22: /mod_base="OTHER" /note="2'-fluoro-nucleotide"
  modified_base 23..23: /mod_base="OTHER" /note="Inverted nucleotide"
ccauucaggaccacagacuaagt

SEQ ID NO: 576 - DNA, 23 bp, Artificial Sequence
  Description of Artificial Sequence: Synthetic oligonucleotide
  Description of Combined DNA/RNA Molecule: Synthetic oligonucleotide
  N-term hydroxyl group
  C-term hydroxyl group
  modified_base 1..1: /mod_base="OTHER" /note="2'-OMe-nucleotide"
  modified_base 2..2: /mod_base="OTHER" /note="2'-OMe-nucleotide"
  modified_base 3..3: /mod_base="OTHER" /note="2'-OMe-nucleotide"
  modified_base 4..4: /mod_base="OTHER" /note="2'-fluoro-nucleotide"
  modified_base 5..5: /mod_base="OTHER" /note="2'-OMe-nucleotide"
  modified_base 6..6: /mod_base="OTHER" /note="2'-fluoro-nucleotide"
  modified_base 7..7: /mod_base="OTHER" /note="2'-OMe-nucleotide"
  modified_base 8..8: /mod_base="OTHER" /note="2'-fluoro-nucleotide"
  modified_base 9..9: /mod_base="OTHER" /note="2'-OMe-nucleotide"
  modified_base 10..10: /mod_base="OTHER" /note="2'-fluoro-nucleotide"
  modified_base 11..11: /mod_base="OTHER" /note="2'-OMe-nucleotide"
  modified_base 12..12: /mod_base="OTHER" /note="2'-fluoro-nucleotide"
  modified_base 13..13: /mod_base="OTHER" /note="2'-OMe-nucleotide"
  modified_base 14..14: /mod_base="OTHER" /note="2'-fluoro-nucleotide"
  modified_base 15..15: /mod_base="OTHER" /note="2'-OMe-nucleotide"
  modified_base 16..16: /mod_base="OTHER" /note="2'-fluoro-nucleotide"
  modified_base 17..17: /mod_base="OTHER" /note="2'-OMe-nucleotide"
  modified_base 18..18: /mod_base="OTHER" /note="2'-fluoro-nucleotide"
  modified_base 19..19: /mod_base="OTHER" /note="2'-OMe-nucleotide"
  modified_base 20..20: /mod_base="OTHER" /note="2'-fluoro-nucleotide"
  modified_base 21..21: /mod_base="OTHER" /note="2'-OMe-nucleotide"
  modified_base 22..22: /mod_base="OTHER" /note="2'-fluoro-nucleotide"
  modified_base 23..23: /mod_base="OTHER" /note="Inverted nucleotide"
ccaucaggaccacagacuaagct

SEQ ID NO: 577 - DNA, 23 bp, Artificial Sequence
  Description of Artificial Sequence: Synthetic oligonucleotide
  Description of Combined DNA/RNA Molecule: Synthetic oligonucleotide
  N-term hydroxyl group
  C-term hydroxyl group
  modified_base 1..1: /mod_base="OTHER" /note="2'-OMe-nucleotide"
  modified_base 2..2: /mod_base="OTHER" /note="2'-OMe-nucleotide"
  modified_base 3..3: /mod_base="OTHER" /note="2'-OMe-nucleotide"
  modified_base 4..4: /mod_base="OTHER" /note="2'-fluoro-nucleotide"
  modified_base 5..5: /mod_base="OTHER" /note="2'-OMe-nucleotide"
  modified_base 6..6: /mod_base="OTHER" /note="2'-fluoro-nucleotide"
  modified_base 7..7: /mod_base="OTHER" /note="2'-OMe-nucleotide"
  modified_base 8..8: /mod_base="OTHER" /note="2'-fluoro-nucleotide"
  modified_base 9..9: /mod_base="OTHER" /note="2'-OMe-nucleotide"
  modified_base 10..10: /mod_base="OTHER" /note="2'-fluoro-nucleotide"
  modified_base 11..11: /mod_base="OTHER" /note="2'-OMe-nucleotide"
  modified_base 12..12: /mod_base="OTHER" /note="2'-fluoro-nucleotide"
  modified_base 13..13: /mod_base="OTHER" /note="2'-OMe-nucleotide"
  modified_base 14..14: /mod_base="OTHER" /note="2'-fluoro-nucleotide"
  modified_base 15..15: /mod_base="OTHER" /note="2'-OMe-nucleotide"
  modified_base 16..16: /mod_base="OTHER" /note="2'-fluoro-nucleotide"
  modified_base 17..17: /mod_base="OTHER" /note="2'-OMe-nucleotide"
  modified_base 18..18: /mod_base="OTHER" /note="2'-fluoro-nucleotide"
  modified_base 19..19: /mod_base="OTHER" /note="2'-OMe-nucleotide"
  modified_base 20..20: /mod_base="OTHER" /note="2'-fluoro-nucleotide"
  modified_base 21..21: /mod_base="OTHER" /note="2'-OMe-nucleotide"
  modified_base 22..22: /mod_base="OTHER" /note="2'-fluoro-nucleotide"
  modified_base 23..23: /mod_base="OTHER" /note="Inverted nucleotide"
ccaaggaccacagacuaagcugt

SEQ ID NO: 578 - DNA, 23 bp, Artificial Sequence
  Description of Artificial Sequence: Synthetic oligonucleotide
  Description of Combined DNA/RNA Molecule: Synthetic oligonucleotide
  N-term hydroxyl group
  C-term hydroxyl group
  modified_base 1..1: /mod_base="OTHER" /note="2'-OMe-nucleotide"
  modified_base 2..2: /mod_base="OTHER" /note="2'-OMe-nucleotide"
  modified_base 3..3: /mod_base="OTHER" /note="2'-OMe-nucleotide"
  modified_base 4..4: /mod_base="OTHER" /note="2'-fluoro-nucleotide"
  modified_base 5..5: /mod_base="OTHER" /note="2'-OMe-nucleotide"
  modified_base 6..6: /mod_base="OTHER" /note="2'-fluoro-nucleotide"
  modified_base 7..7: /mod_base="OTHER" /note="2'-OMe-nucleotide"
  modified_base 8..8: /mod_base="OTHER" /note="2'-fluoro-nucleotide"
  modified_base 9..9: /mod_base="OTHER" /note="2'-OMe-nucleotide"
  modified_base 10..10: /mod_base="OTHER" /note="2'-fluoro-nucleotide"
  modified_base 11..11: /mod_base="OTHER" /note="2'-OMe-nucleotide"
  modified_base 12..12: /mod_base="OTHER" /note="2'-fluoro-nucleotide"
  modified_base 13..13: /mod_base="OTHER" /note="2'-OMe-nucleotide"
  modified_base 14..14: /mod_base="OTHER" /note="2'-fluoro-nucleotide"
  modified_base 15..15: /mod_base="OTHER" /note="2'-OMe-nucleotide"
  modified_base 16..16: /mod_base="OTHER" /note="2'-fluoro-nucleotide"
  modified_base 17..17: /mod_base="OTHER" /note="2'-OMe-nucleotide"
  modified_base 18..18: /mod_base="OTHER" /note="2'-fluoro-nucleotide"
  modified_base 19..19: /mod_base="OTHER" /note="2'-OMe-nucleotide"
  modified_base 20..20: /mod_base="OTHER" /note="2'-fluoro-nucleotide"
  modified_base 21..21: /mod_base="OTHER" /note="2'-OMe-nucleotide"
  modified_base 22..22: /mod_base="OTHER" /note="2'-fluoro-nucleotide"
  modified_base 23..23: /mod_base="OTHER" /note="Inverted nucleotide"
ccaggaccacagacuaagcugut

SEQ ID NO: 579 - DNA, 23 bp, Artificial Sequence
  Description of Artificial Sequence: Synthetic oligonucleotide
  Description of Combined DNA/RNA Molecule: Synthetic oligonucleotide
  N-term hydroxyl group
  C-term hydroxyl group
  modified_base 1..1: /mod_base="OTHER" /note="2'-OMe-nucleotide"
  modified_base 2..2: /mod_base="OTHER" /note="2'-OMe-nucleotide"
  modified_base 3..3: /mod_base="OTHER" /note="2'-OMe-nucleotide"
  modified_base 4..4: /mod_base="OTHER" /note="2'-fluoro-nucleotide"
  modified_base 5..5: /mod_base="OTHER" /note="2'-OMe-nucleotide"
  modified_base 6..6: /mod_base="OTHER" /note="2'-fluoro-nucleotide"
  modified_base 7..7: /mod_base="OTHER" /note="2'-OMe-nucleotide"
  modified_base 8..8: /mod_base="OTHER" /note="2'-fluoro-nucleotide"
  modified_base 9..9: /mod_base="OTHER" /note="2'-OMe-nucleotide"
  modified_base 10..10: /mod_base="OTHER" /note="2'-fluoro-nucleotide"
  modified_base 11..11: /mod_base="OTHER" /note="2'-OMe-nucleotide"
  modified_base 12..12: /mod_base="OTHER" /note="2'-fluoro-nucleotide"
  modified_base 13..13: /mod_base="OTHER" /note="2'-OMe-nucleotide"
  modified_base 14..14: /mod_base="OTHER" /note="2'-fluoro-nucleotide"
  modified_base 15..15: /mod_base="OTHER" /note="2'-OMe-nucleotide"
  modified_base 16..16: /mod_base="OTHER" /note="2'-fluoro-nucleotide"
  modified_base 17..17: /mod_base="OTHER" /note="2'-OMe-nucleotide"
  modified_base 18..18: /mod_base="OTHER" /note="2'-fluoro-nucleotide"
  modified_base 19..19: /mod_base="OTHER" /note="2'-OMe-nucleotide"
  modified_base 20..20: /mod_base="OTHER" /note="2'-fluoro-nucleotide"
  modified_base 21..21: /mod_base="OTHER" /note="2'-OMe-nucleotide"
  modified_base 22..22: /mod_base="OTHER" /note="2'-fluoro-nucleotide"
  modified_base 23..23: /mod_base="OTHER" /note="Inverted nucleotide"
ccagaccacagacuaagcuguct

SEQ ID NO: 580 - DNA, 23 bp, Artificial Sequence
  Description of Artificial Sequence: Synthetic oligonucleotide
  Description of Combined DNA/RNA Molecule: Synthetic oligonucleotide
  N-term hydroxyl group
  C-term hydroxyl group
  modified_base 1..1: /mod_base="OTHER" /note="2'-OMe-nucleotide"
  modified_base 2..2: /mod_base="OTHER" /note="2'-OMe-nucleotide"
  modified_base 3..3: /mod_base="OTHER" /note="2'-OMe-nucleotide"
  modified_base 4..4: /mod_base="OTHER" /note="2'-fluoro-nucleotide"
  modified_base 5..5: /mod_base="OTHER" /note="2'-OMe-nucleotide"
  modified_base 6..6: /mod_base="OTHER" /note="2'-fluoro-nucleotide"
  modified_base 7..7: /mod_base="OTHER" /note="2'-OMe-nucleotide"
  modified_base 8..8: /mod_base="OTHER" /note="2'-fluoro-nucleotide"
  modified_base 9..9: /mod_base="OTHER" /note="2'-OMe-nucleotide"
  modified_base 10..10: /mod_base="OTHER" /note="2'-fluoro-nucleotide"
  modified_base 11..11: /mod_base="OTHER" /note="2'-OMe-nucleotide"
  modified_base 12..12: /mod_base="OTHER" /note="2'-fluoro-nucleotide"
  modified_base 13..13: /mod_base="OTHER" /note="2'-OMe-nucleotide"
  modified_base 14..14: /mod_base="OTHER" /note="2'-fluoro-nucleotide"
  modified_base 15..15: /mod_base="OTHER" /note="2'-OMe-nucleotide"
  modified_base 16..16: /mod_base="OTHER" /note="2'-fluoro-nucleotide"
  modified_base 17..17: /mod_base="OTHER" /note="2'-OMe-nucleotide"
  modified_base 18..18: /mod_base="OTHER" /note="2'-fluoro-nucleotide"
  modified_base 19..19: /mod_base="OTHER" /note="2'-OMe-nucleotide"
  modified_base 20..20: /mod_base="OTHER" /note="2'-fluoro-nucleotide"
  modified_base 21..21: /mod_base="OTHER" /note="2'-OMe-nucleotide"
  modified_base 22..22: /mod_base="OTHER" /note="2'-fluoro-nucleotide"
  modified_base 23..23: /mod_base="OTHER" /note="Inverted nucleotide"
ccauuuuuuagggccagaauact

SEQ ID NO: 581 - DNA, 23 bp, Artificial Sequence
  Description of Artificial Sequence: Synthetic oligonucleotide
  Description of Combined DNA/RNA Molecule: Synthetic oligonucleotide
  N-term hydroxyl group
  C-term hydroxyl group
  modified_base 1..1: /mod_base="OTHER" /note="2'-OMe-nucleotide"
  modified_base 2..2: /mod_base="OTHER" /note="2'-OMe-nucleotide"
  modified_base 3..3: /mod_base="OTHER" /note="2'-OMe-nucleotide"
  modified_base 4..4: /mod_base="OTHER" /note="2'-fluoro-nucleotide"
  modified_base 5..5: /mod_base="OTHER" /note="2'-OMe-nucleotide"
  modified_base 6..6: /mod_base="OTHER" /note="2'-fluoro-nucleotide"
  modified_base 7..7: /mod_base="OTHER" /note="2'-OMe-nucleotide"
  modified_base 8..8: /mod_base="OTHER" /note="2'-fluoro-nucleotide"
  modified_base 9..9: /mod_base="OTHER" /note="2'-OMe-nucleotide"
  modified_base 10..10: /mod_base="OTHER" /note="2'-fluoro-nucleotide"
  modified_base 11..11: /mod_base="OTHER" /note="2'-OMe-nucleotide"
  modified_base 12..12: /mod_base="OTHER" /note="2'-fluoro-nucleotide"
  modified_base 13..13: /mod_base="OTHER" /note="2'-OMe-nucleotide"
  modified_base 14..14: /mod_base="OTHER" /note="2'-fluoro-nucleotide"
  modified_base 15..15: /mod_base="OTHER" /note="2'-OMe-nucleotide"
  modified_base 16..16: /mod_base="OTHER" /note="2'-fluoro-nucleotide"
  modified_base 17..17: /mod_base="OTHER" /note="2'-OMe-nucleotide"
  modified_base 18..18: /mod_base="OTHER" /note="2'-fluoro-nucleotide"
  modified_base 19..19: /mod_base="OTHER" /note="2'-OMe-nucleotide"
  modified_base 20..20: /mod_base="OTHER" /note="2'-fluoro-nucleotide"
  modified_base 21..21: /mod_base="OTHER" /note="2'-OMe-nucleotide"
  modified_base 22..22: /mod_base="OTHER" /note="2'-fluoro-nucleotide"
  modified_base 23..23: /mod_base="OTHER" /note="Inverted nucleotide"
ccauuuuuagggccagaauacct

SEQ ID NO: 582 - DNA, 23 bp, Artificial Sequence
  Description of Artificial Sequence: Synthetic oligonucleotide
  Description of Combined DNA/RNA Molecule: Synthetic oligonucleotide
  N-term hydroxyl group
  C-term hydroxyl group
  modified_base 1..1: /mod_base="OTHER" /note="2'-OMe-nucleotide"
  modified_base 2..2: /mod_base="OTHER" /note="2'-OMe-nucleotide"
  modified_base 3..3: /mod_base="OTHER" /note="2'-OMe-nucleotide"
  modified_base 4..4: /mod_base="OTHER" /note="2'-fluoro-nucleotide"
  modified_base 5..5: /mod_base="OTHER" /note="2'-OMe-nucleotide"
  modified_base 6..6: /mod_base="OTHER" /note="2'-fluoro-nucleotide"
  modified_base 7..7: /mod_base="OTHER" /note="2'-OMe-nucleotide"
  modified_base 8..8: /mod_base="OTHER" /note="2'-fluoro-nucleotide"
  modified_base 9..9: /mod_base="OTHER" /note="2'-OMe-nucleotide"
  modified_base 10..10: /mod_base="OTHER" /note="2'-fluoro-nucleotide"
  modified_base 11..11: /mod_base="OTHER" /note="2'-OMe-nucleotide"
  modified_base 12..12: /mod_base="OTHER" /note="2'-fluoro-nucleotide"
  modified_base 13..13: /mod_base="OTHER" /note="2'-OMe-nucleotide"
  modified_base 14..14: /mod_base="OTHER" /note="2'-fluoro-nucleotide"
  modified_base 15..15: /mod_base="OTHER" /note="2'-OMe-nucleotide"
  modified_base 16..16: /mod_base="OTHER" /note="2'-fluoro-nucleotide"
  modified_base 17..17: /mod_base="OTHER" /note="2'-OMe-nucleotide"
  modified_base 18..18: /mod_base="OTHER" /note="2'-fluoro-nucleotide"
  modified_base 19..19: /mod_base="OTHER" /note="2'-OMe-nucleotide"
  modified_base 20..20: /mod_base="OTHER" /note="2'-fluoro-nucleotide"
  modified_base 21..21: /mod_base="OTHER" /note="2'-OMe-nucleotide"
  modified_base 22..22: /mod_base="OTHER" /note="2'-fluoro-nucleotide"
  modified_base 23..23: /mod_base="OTHER" /note="Inverted nucleotide"
ccauuuuagggccagaauaccat

SEQ ID NO: 583 - DNA, 23 bp, Artificial Sequence
  Description of Artificial Sequence: Synthetic oligonucleotide
  Description of Combined DNA/RNA Molecule: Synthetic oligonucleotide
  N-term hydroxyl group
  C-term hydroxyl group
  modified_base 1..1: /mod_base="OTHER" /note="2'-OMe-nucleotide"
  modified_base 2..2: /mod_base="OTHER" /note="2'-OMe-nucleotide"
  modified_base 3..3: /mod_base="OTHER" /note="2'-OMe-nucleotide"
  modified_base 4..4: /mod_base="OTHER" /note="2'-fluoro-nucleotide"
  modified_base 5..5: /mod_base="OTHER" /note="2'-OMe-nucleotide"
  modified_base 6..6: /mod_base="OTHER" /note="2'-fluoro-nucleotide"
  modified_base 7..7: /mod_base="OTHER" /note="2'-OMe-nucleotide"
  modified_base 8..8: /mod_base="OTHER" /note="2'-fluoro-nucleotide"
  modified_base 9..9: /mod_base="OTHER" /note="2'-OMe-nucleotide"
  modified_base 10..10: /mod_base="OTHER" /note="2'-fluoro-nucleotide"
  modified_base 11..11: /mod_base="OTHER" /note="2'-OMe-nucleotide"
  modified_base 12..12: /mod_base="OTHER" /note="2'-fluoro-nucleotide"
  modified_base 13..13: /mod_base="OTHER" /note="2'-OMe-nucleotide"
  modified_base 14..14: /mod_base="OTHER" /note="2'-fluoro-nucleotide"
  modified_base 15..15: /mod_base="OTHER" /note="2'-OMe-nucleotide"
  modified_base 16..16: /mod_base="OTHER" /note="2'-fluoro-nucleotide"
  modified_base 17..17: /mod_base="OTHER" /note="2'-OMe-nucleotide"
  modified_base 18..18: /mod_base="OTHER" /note="2'-fluoro-nucleotide"
  modified_base 19..19: /mod_base="OTHER" /note="2'-OMe-nucleotide"
  modified_base 20..20: /mod_base="OTHER" /note="2'-fluoro-nucleotide"
  modified_base 21..21: /mod_base="OTHER" /note="2'-OMe-nucleotide"
  modified_base 22..22: /mod_base="OTHER" /note="2'-fluoro-nucleotide"
  modified_base 23..23: /mod_base="OTHER" /note="Inverted nucleotide"
ccauuuagggccagaauaccaat

SEQ ID NO: 584 - DNA, 23 bp, Artificial Sequence
  Description of Artificial Sequence: Synthetic oligonucleotide
  Description of Combined DNA/RNA Molecule: Synthetic oligonucleotide
  N-term hydroxyl group
  C-term hydroxyl group
  modified_base 1..1: /mod_base="OTHER" /note="2'-OMe-nucleotide"
  modified_base 2..2: /mod_base="OTHER" /note="2'-OMe-nucleotide"
  modified_base 3..3: /mod_base="OTHER" /note="2'-OMe-nucleotide"
  modified_base 4..4: /mod_base="OTHER" /note="2'-fluoro-nucleotide"
  modified_base 5..5: /mod_base="OTHER" /note="2'-OMe-nucleotide"
  modified_base 6..6: /mod_base="OTHER" /note="2'-fluoro-nucleotide"
  modified_base 7..7: /mod_base="OTHER" /note="2'-OMe-nucleotide"
  modified_base 8..8: /mod_base="OTHER" /note="2'-fluoro-nucleotide"
  modified_base 9..9: /mod_base="OTHER" /note="2'-OMe-nucleotide"
  modified_base 10..10: /mod_base="OTHER" /note="2'-fluoro-nucleotide"
  modified_base 11..11: /mod_base="OTHER" /note="2'-OMe-nucleotide"
  modified_base 12..12: /mod_base="OTHER" /note="2'-fluoro-nucleotide"
  modified_base 13..13: /mod_base="OTHER" /note="2'-OMe-nucleotide"
  modified_base 14..14: /mod_base="OTHER" /note="2'-fluoro-nucleotide"
  modified_base 15..15: /mod_base="OTHER" /note="2'-OMe-nucleotide"
  modified_base 16..16: /mod_base="OTHER" /note="2'-fluoro-nucleotide"
  modified_base 17..17: /mod_base="OTHER" /note="2'-OMe-nucleotide"
  modified_base 18..18: /mod_base="OTHER" /note="2'-fluoro-nucleotide"
  modified_base 19..19: /mod_base="OTHER" /note="2'-OMe-nucleotide"
  modified_base 20..20: /mod_base="OTHER" /note="2'-fluoro-nucleotide"
  modified_base 21..21: /mod_base="OTHER" /note="2'-OMe-nucleotide"
  modified_base 22..22: /mod_base="OTHER" /note="2'-fluoro-nucleotide"
  modified_base 23..23: /mod_base="OTHER" /note="Inverted nucleotide"
ccauuagggccagaauaccaaat

SEQ ID NO: 585 - DNA, 23 bp, Artificial Sequence
  Description of Artificial Sequence: Synthetic oligonucleotide
  Description of Combined DNA/RNA Molecule: Synthetic oligonucleotide
  N-term hydroxyl group
  C-term hydroxyl group
  modified_base 1..1: /mod_base="OTHER" /note="2'-OMe-nucleotide"
  modified_base 2..2: /mod_base="OTHER" /note="2'-OMe-nucleotide"
  modified_base 3..3: /mod_base="OTHER" /note="2'-OMe-nucleotide"
  modified_base 4..4: /mod_base="OTHER" /note="2'-fluoro-nucleotide"
  modified_base 5..5: /mod_base="OTHER" /note="2'-OMe-nucleotide"
  modified_base 6..6: /mod_base="OTHER" /note="2'-fluoro-nucleotide"
  modified_base 7..7: /mod_base="OTHER" /note="2'-OMe-nucleotide"
  modified_base 8..8: /mod_base="OTHER" /note="2'-fluoro-nucleotide"
  modified_base 9..9: /mod_base="OTHER" /note="2'-OMe-nucleotide"
  modified_base 10..10: /mod_base="OTHER" /note="2'-fluoro-nucleotide"
  modified_base 11..11: /mod_base="OTHER" /note="2'-OMe-nucleotide"
  modified_base 12..12: /mod_base="OTHER" /note="2'-fluoro-nucleotide"
  modified_base 13..13: /mod_base="OTHER" /note="2'-OMe-nucleotide"
  modified_base 14..14: /mod_base="OTHER" /note="2'-fluoro-nucleotide"
  modified_base 15..15: /mod_base="OTHER" /note="2'-OMe-nucleotide"
  modified_base 16..16: /mod_base="OTHER" /note="2'-fluoro-nucleotide"
  modified_base 17..17: /mod_base="OTHER" /note="2'-OMe-nucleotide"
  modified_base 18..18: /mod_base="OTHER" /note="2'-fluoro-nucleotide"
  modified_base 19..19: /mod_base="OTHER" /note="2'-OMe-nucleotide"
  modified_base 20..20: /mod_base="OTHER" /note="2'-fluoro-nucleotide"
  modified_base 21..21: /mod_base="OTHER" /note="2'-OMe-nucleotide"
  modified_base 22..22: /mod_base="OTHER" /note="2'-fluoro-nucleotide"
  modified_base 23..23: /mod_base="OTHER" /note="Inverted nucleotide"
ccauagggccagaauaccaaaat

SEQ ID NO: 586 - DNA, 23 bp, Artificial Sequence
  Description of Artificial Sequence: Synthetic oligonucleotide
  Description of Combined DNA/RNA Molecule: Synthetic oligonucleotide
  N-term hydroxyl group
  C-term hydroxyl group
  modified_base 1..1: /mod_base="OTHER" /note="2'-OMe-nucleotide"
  modified_base 2..2: /mod_base="OTHER" /note="2'-OMe-nucleotide"
  modified_base 3..3: /mod_base="OTHER" /note="2'-OMe-nucleotide"
  modified_base 4..4: /mod_base="OTHER" /note="2'-fluoro-nucleotide"
  modified_base 5..5: /mod_base="OTHER" /note="2'-OMe-nucleotide"
  modified_base 6..6: /mod_base="OTHER" /note="2'-fluoro-nucleotide"
  modified_base 7..7: /mod_base="OTHER" /note="2'-OMe-nucleotide"
  modified_base 8..8: /mod_base="OTHER" /note="2'-fluoro-nucleotide"
  modified_base 9..9: /mod_base="OTHER" /note="2'-OMe-nucleotide"
  modified_base 10..10: /mod_base="OTHER" /note="2'-fluoro-nucleotide"
  modified_base 11..11: /mod_base="OTHER" /note="2'-OMe-nucleotide"
  modified_base 12..12: /mod_base="OTHER" /note="2'-fluoro-nucleotide"
  modified_base 13..13: /mod_base="OTHER" /note="2'-OMe-nucleotide"
  modified_base 14..14: /mod_base="OTHER" /note="2'-fluoro-nucleotide"
  modified_base 15..15: /mod_base="OTHER" /note="2'-OMe-nucleotide"
  modified_base 16..16: /mod_base="OTHER" /note="2'-fluoro-nucleotide"
  modified_base 17..17: /mod_base="OTHER" /note="2'-OMe-nucleotide"
  modified_base 18..18: /mod_base="OTHER" /note="2'-fluoro-nucleotide"
  modified_base 19..19: /mod_base="OTHER" /note="2'-OMe-nucleotide"
  modified_base 20..20: /mod_base="OTHER" /note="2'-fluoro-nucleotide"
  modified_base 21..21: /mod_base="OTHER" /note="2'-OMe-nucleotide"
  modified_base 22..22: /mod_base="OTHER" /note="2'-fluoro-nucleotide"
  modified_base 23..23: /mod_base="OTHER" /note="Inverted nucleotide"
ccaagggccagaauaccaaaaut

SEQ ID NO: 587 - DNA, 23 bp, Artificial Sequence
  Description of Artificial Sequence: Synthetic oligonucleotide
  Description of Combined DNA/RNA Molecule: Synthetic oligonucleotide
  N-term hydroxyl group
  C-term hydroxyl group
  modified_base 1..1: /mod_base="OTHER" /note="2'-OMe-nucleotide"
  modified_base 2..2: /mod_base="OTHER" /note="2'-OMe-nucleotide"
  modified_base 3..3: /mod_base="OTHER" /note="2'-OMe-nucleotide"
  modified_base 4..4: /mod_base="OTHER" /note="2'-fluoro-nucleotide"
  modified_base 5..5: /mod_base="OTHER" /note="2'-OMe-nucleotide"
  modified_base 6..6: /mod_base="OTHER" /note="2'-fluoro-nucleotide"
  modified_base 7..7: /mod_base="OTHER" /note="2'-OMe-nucleotide"
  modified_base 8..8: /mod_base="OTHER" /note="2'-fluoro-nucleotide"
  modified_base 9..9: /mod_base="OTHER" /note="2'-OMe-nucleotide"
  modified_base 10..10: /mod_base="OTHER" /note="2'-fluoro-nucleotide"
  modified_base 11..11: /mod_base="OTHER" /note="2'-OMe-nucleotide"
  modified_base 12..12: /mod_base="OTHER" /note="2'-fluoro-nucleotide"
  modified_base 13..13: /mod_base="OTHER" /note="2'-OMe-nucleotide"
  modified_base 14..14: /mod_base="OTHER" /note="2'-fluoro-nucleotide"
  modified_base 15..15: /mod_base="OTHER" /note="2'-OMe-nucleotide"
  modified_base 16..16: /mod_base="OTHER" /note="2'-fluoro-nucleotide"
  modified_base 17..17: /mod_base="OTHER" /note="2'-OMe-nucleotide"
  modified_base 18..18: /mod_base="OTHER" /note="2'-fluoro-nucleotide"
  modified_base 19..19: /mod_base="OTHER" /note="2'-OMe-nucleotide"
  modified_base 20..20: /mod_base="OTHER" /note="2'-fluoro-nucleotide"
  modified_base 21..21: /mod_base="OTHER" /note="2'-OMe-nucleotide"
  modified_base 22..22: /mod_base="OTHER" /note="2'-fluoro-nucleotide"
  modified_base 23..23: /mod_base="OTHER" /note="Inverted nucleotide"
ccaaaauuggacaauuucaaaut

SEQ ID NO: 588 - DNA, 23 bp, Artificial Sequence
  Description of Artificial Sequence: Synthetic oligonucleotide
  Description of Combined DNA/RNA Molecule: Synthetic oligonucleotide
  N-term hydroxyl group
  C-term hydroxyl group
  modified_base 1..1: /mod_base="OTHER" /note="2'-OMe-nucleotide"
  modified_base 2..2: /mod_base="OTHER" /note="2'-OMe-nucleotide"
  modified_base 3..3: /mod_base="OTHER" /note="2'-OMe-nucleotide"
  modified_base 4..4: /mod_base="OTHER" /note="2'-fluoro-nucleotide"
  modified_base 5..5: /mod_base="OTHER" /note="2'-OMe-nucleotide"
  modified_base 6..6: /mod_base="OTHER" /note="2'-fluoro-nucleotide"
  modified_base 7..7: /mod_base="OTHER" /note="2'-OMe-nucleotide"
  modified_base 8..8: /mod_base="OTHER" /note="2'-fluoro-nucleotide"
  modified_base 9..9: /mod_base="OTHER" /note="2'-OMe-nucleotide"
  modified_base 10..10: /mod_base="OTHER" /note="2'-fluoro-nucleotide"
  modified_base 11..11: /mod_base="OTHER" /note="2'-OMe-nucleotide"
  modified_base 12..12: /mod_base="OTHER" /note="2'-fluoro-nucleotide"
  modified_base 13..13: /mod_base="OTHER" /note="2'-OMe-nucleotide"
  modified_base 14..14: /mod_base="OTHER" /note="2'-fluoro-nucleotide"
  modified_base 15..15: /mod_base="OTHER" /note="2'-OMe-nucleotide"
  modified_base 16..16: /mod_base="OTHER" /note="2'-fluoro-nucleotide"
  modified_base 17..17: /mod_base="OTHER" /note="2'-OMe-nucleotide"
  modified_base 18..18: /mod_base="OTHER" /note="2'-fluoro-nucleotide"
  modified_base 19..19: /mod_base="OTHER" /note="2'-OMe-nucleotide"
  modified_base 20..20: /mod_base="OTHER" /note="2'-fluoro-nucleotide"
  modified_base 21..21: /mod_base="OTHER" /note="2'-OMe-nucleotide"
  modified_base 22..22: /mod_base="OTHER" /note="2'-fluoro-nucleotide"
  modified_base 23..23: /mod_base="OTHER" /note="Inverted nucleotide"
ccaauuggacaauuucaaaugct

SEQ ID NO: 589 - DNA, 23 bp, Artificial Sequence
  Description of Artificial Sequence: Synthetic oligonucleotide
  Description of Combined DNA/RNA Molecule: Synthetic oligonucleotide
  N-term hydroxyl group
  C-term hydroxyl group
  modified_base 1..1: /mod_base="OTHER" /note="2'-OMe-nucleotide"
  modified_base 2..2: /mod_base="OTHER" /note="2'-OMe-nucleotide"
  modified_base 3..3: /mod_base="OTHER" /note="2'-OMe-nucleotide"
  modified_base 4..4: /mod_base="OTHER" /note="2'-fluoro-nucleotide"
  modified_base 5..5: /mod_base="OTHER" /note="2'-OMe-nucleotide"
  modified_base 6..6: /mod_base="OTHER" /note="2'-fluoro-nucleotide"
  modified_base 7..7: /mod_base="OTHER" /note="2'-OMe-nucleotide"
  modified_base 8..8: /mod_base="OTHER" /note="2'-fluoro-nucleotide"
  modified_base 9..9: /mod_base="OTHER" /note="2'-OMe-nucleotide"
  modified_base 10..10: /mod_base="OTHER" /note="2'-fluoro-nucleotide"
  modified_base 11..11: /mod_base="OTHER" /note="2'-OMe-nucleotide"
  modified_base 12..12: /mod_base="OTHER" /note="2'-fluoro-nucleotide"
  modified_base 13..13: /mod_base="OTHER" /note="2'-OMe-nucleotide"
  modified_base 14..14: /mod_base="OTHER" /note="2'-fluoro-nucleotide"
  modified_base 15..15: /mod_base="OTHER" /note="2'-OMe-nucleotide"
  modified_base 16..16: /mod_base="OTHER" /note="2'-fluoro-nucleotide"
  modified_base 17..17: /mod_base="OTHER" /note="2'-OMe-nucleotide"
  modified_base 18..18: /mod_base="OTHER" /note="2'-fluoro-nucleotide"
  modified_base 19..19: /mod_base="OTHER" /note="2'-OMe-nucleotide"
  modified_base 20..20: /mod_base="OTHER" /note="2'-fluoro-nucleotide"
  modified_base 21..21: /mod_base="OTHER" /note="2'-OMe-nucleotide"
  modified_base 22..22: /mod_base="OTHER" /note="2'-fluoro-nucleotide"
  modified_base 23..23: /mod_base="OTHER" /note="Inverted nucleotide"
ccauuggacaauuucaaaugcat

SEQ ID NO: 590 - DNA, 23 bp, Artificial Sequence
  Description of Artificial Sequence: Synthetic oligonucleotide
  Description of Combined DNA/RNA Molecule: Synthetic oligonucleotide
  N-term hydroxyl group
  C-term hydroxyl group
  modified_base 1..1: /mod_base="OTHER" /note="2'-OMe-nucleotide"
  modified_base 2..2: /mod_base="OTHER" /note="2'-OMe-nucleotide"
  modified_base 3..3: /mod_base="OTHER" /note="2'-OMe-nucleotide"
  modified_base 4..4: /mod_base="OTHER" /note="2'-fluoro-nucleotide"
  modified_base 5..5: /mod_base="OTHER" /note="2'-OMe-nucleotide"
  modified_base 6..6: /mod_base="OTHER" /note="2'-fluoro-nucleotide"
  modified_base 7..7: /mod_base="OTHER" /note="2'-OMe-nucleotide"
  modified_base 8..8: /mod_base="OTHER" /note="2'-fluoro-nucleotide"
  modified_base 9..9: /mod_base="OTHER" /note="2'-OMe-nucleotide"
  modified_base 10..10: /mod_base="OTHER" /note="2'-fluoro-nucleotide"
  modified_base 11..11: /mod_base="OTHER" /note="2'-OMe-nucleotide"
  modified_base 12..12: /mod_base="OTHER" /note="2'-fluoro-nucleotide"
  modified_base 13..13: /mod_base="OTHER" /note="2'-OMe-nucleotide"
  modified_base 14..14: /mod_base="OTHER" /note="2'-fluoro-nucleotide"
  modified_base 15..15: /mod_base="OTHER" /note="2'-OMe-nucleotide"
  modified_base 16..16: /mod_base="OTHER" /note="2'-fluoro-nucleotide"
  modified_base 17..17: /mod_base="OTHER" /note="2'-OMe-nucleotide"
  modified_base 18..18: /mod_base="OTHER" /note="2'-fluoro-nucleotide"
  modified_base 19..19: /mod_base="OTHER" /note="2'-OMe-nucleotide"
  modified_base 20..20: /mod_base="OTHER" /note="2'-fluoro-nucleotide"
  modified_base 21..21: /mod_base="OTHER" /note="2'-OMe-nucleotide"
  modified_base 22..22: /mod_base="OTHER" /note="2'-fluoro-nucleotide"
  modified_base 23..23: /mod_base="OTHER" /note="Inverted nucleotide"
ccauuaauauaugaguugcuuct

SEQ ID NO: 591 - DNA, 23 bp, Artificial Sequence
  Description of Artificial Sequence: Synthetic oligonucleotide
  Description of Combined DNA/RNA Molecule: Synthetic oligonucleotide
  N-term hydroxyl group
  C-term hydroxyl group
  modified_base 1..1: /mod_base="OTHER" /note="2'-OMe-nucleotide"
  modified_base 2..2: /mod_base="OTHER" /note="2'-OMe-nucleotide"
  modified_base 3..3: /mod_base="OTHER" /note="2'-OMe-nucleotide"
  modified_base 4..4: /mod_base="OTHER" /note="2'-fluoro-nucleotide"
  modified_base 5..5: /mod_base="OTHER" /note="2'-OMe-nucleotide"
  modified_base 6..6: /mod_base="OTHER" /note="2'-fluoro-nucleotide"
  modified_base 7..7: /mod_base="OTHER" /note="2'-OMe-nucleotide"
  modified_base 8..8: /mod_base="OTHER" /note="2'-fluoro-nucleotide"
  modified_base 9..9: /mod_base="OTHER" /note="2'-OMe-nucleotide"
  modified_base 10..10: /mod_base="OTHER" /note="2'-fluoro-nucleotide"
  modified_base 11..11: /mod_base="OTHER" /note="2'-OMe-nucleotide"
  modified_base 12..12: /mod_base="OTHER" /note="2'-fluoro-nucleotide"
  modified_base 13..13: /mod_base="OTHER" /note="2'-OMe-nucleotide"
  modified_base 14..14: /mod_base="OTHER" /note="2'-fluoro-nucleotide"
  modified_base 15..15: /mod_base="OTHER" /note="2'-OMe-nucleotide"
  modified_base 16..16: /mod_base="OTHER" /note="2'-fluoro-nucleotide"
  modified_base 17..17: /mod_base="OTHER" /note="2'-OMe-nucleotide"
  modified_base 18..18: /mod_base="OTHER" /note="2'-fluoro-nucleotide"
  modified_base 19..19: /mod_base="OTHER" /note="2'-OMe-nucleotide"
  modified_base 20..20: /mod_base="OTHER" /note="2'-fluoro-nucleotide"
  modified_base 21..21: /mod_base="OTHER" /note="2'-OMe-nucleotide"
  modified_base 22..22: /mod_base="OTHER" /note="2'-fluoro-nucleotide"
  modified_base 23..23: /mod_base="OTHER" /note="Inverted nucleotide"
ccagaauugaucaagacaauuct

SEQ ID NO: 592 - DNA, 23 bp, Artificial Sequence
  Description of Artificial Sequence: Synthetic oligonucleotide
  Description of Combined DNA/RNA Molecule: Synthetic oligonucleotide
  N-term hydroxyl group
  C-term hydroxyl group
  modified_base 1..1: /mod_base="OTHER" /note="2'-OMe-nucleotide"
  modified_base 2..2: /mod_base="OTHER" /note="2'-OMe-nucleotide"
  modified_base 3..3: /mod_base="OTHER" /note="2'-OMe-nucleotide"
  modified_base 4..4: /mod_base="OTHER" /note="2'-fluoro-nucleotide"
  modified_base 5..5: /mod_base="OTHER" /note="2'-OMe-nucleotide"
  modified_base 6..6: /mod_base="OTHER" /note="2'-fluoro-nucleotide"
  modified_base 7..7: /mod_base="OTHER" /note="2'-OMe-nucleotide"
  modified_base 8..8: /mod_base="OTHER" /note="2'-fluoro-nucleotide"
  modified_base 9..9: /mod_base="OTHER" /note="2'-OMe-nucleotide"
  modified_base 10..10: /mod_base="OTHER" /note="2'-fluoro-nucleotide"
  modified_base 11..11: /mod_base="OTHER" /note="2'-OMe-nucleotide"
  modified_base 12..12: /mod_base="OTHER" /note="2'-fluoro-nucleotide"
  modified_base 13..13: /mod_base="OTHER" /note="2'-OMe-nucleotide"
  modified_base 14..14: /mod_base="OTHER" /note="2'-fluoro-nucleotide"
  modified_base 15..15: /mod_base="OTHER" /note="2'-OMe-nucleotide"
  modified_base 16..16: /mod_base="OTHER" /note="2'-fluoro-nucleotide"
  modified_base 17..17: /mod_base="OTHER" /note="2'-OMe-nucleotide"
  modified_base 18..18: /mod_base="OTHER" /note="2'-fluoro-nucleotide"
  modified_base 19..19: /mod_base="OTHER" /note="2'-OMe-nucleotide"
  modified_base 20..20: /mod_base="OTHER" /note="2'-fluoro-nucleotide"
  modified_base 21..21: /mod_base="OTHER" /note="2'-OMe-nucleotide"
  modified_base 22..22: /mod_base="OTHER" /note="2'-fluoro-nucleotide"
  modified_base 23..23: /mod_base="OTHER" /note="Inverted nucleotide"
ccaaauugaucaagacaauucat

SEQ ID NO: 593 - DNA, 23 bp, Artificial Sequence
  Description of Artificial Sequence: Synthetic oligonucleotide
  Description of Combined DNA/RNA Molecule: Synthetic oligonucleotide
  N-term hydroxyl group
  C-term hydroxyl group
  modified_base 1..1: /mod_base="OTHER" /note="2'-OMe-nucleotide"
  modified_base 2..2: /mod_base="OTHER" /note="2'-OMe-nucleotide"
  modified_base 3..3: /mod_base="OTHER" /note="2'-OMe-nucleotide"
  modified_base 4..4: /mod_base="OTHER" /note="2'-fluoro-nucleotide"
  modified_base 5..5: /mod_base="OTHER" /note="2'-OMe-nucleotide"
  modified_base 6..6: /mod_base="OTHER" /note="2'-fluoro-nucleotide"
  modified_base 7..7: /mod_base="OTHER" /note="2'-OMe-nucleotide"
  modified_base 8..8: /mod_base="OTHER" /note="2'-fluoro-nucleotide"
  modified_base 9..9: /mod_base="OTHER" /note="2'-OMe-nucleotide"
  modified_base 10..10: /mod_base="OTHER" /note="2'-fluoro-nucleotide"
  modified_base 11..11: /mod_base="OTHER" /note="2'-OMe-nucleotide"
  modified_base 12..12: /mod_base="OTHER" /note="2'-fluoro-nucleotide"
  modified_base 13..13: /mod_base="OTHER" /note="2'-OMe-nucleotide"
  modified_base 14..14: /mod_base="OTHER" /note="2'-fluoro-nucleotide"
  modified_base 15..15: /mod_base="OTHER" /note="2'-OMe-nucleotide"
  modified_base 16..16: /mod_base="OTHER" /note="2'-fluoro-nucleotide"
  modified_base 17..17: /mod_base="OTHER" /note="2'-OMe-nucleotide"
  modified_base 18..18: /mod_base="OTHER" /note="2'-fluoro-nucleotide"
  modified_base 19..19: /mod_base="OTHER" /note="2'-OMe-nucleotide"
  modified_base 20..20: /mod_base="OTHER" /note="2'-fluoro-nucleotide"
  modified_base 21..21: /mod_base="OTHER" /note="2'-OMe-nucleotide"
  modified_base 22..22: /mod_base="OTHER" /note="2'-fluoro-nucleotide"
  modified_base 23..23: /mod_base="OTHER" /note="Inverted nucleotide"
ccaauugaucaagacaauucaut

SEQ ID NO: 594 - DNA, 23 bp, Artificial Sequence
  Description of Artificial Sequence: Synthetic oligonucleotide
  Description of Combined DNA/RNA Molecule: Synthetic oligonucleotide
  N-term hydroxyl group
  C-term hydroxyl group
  modified_base 1..1: /mod_base="OTHER" /note="2'-OMe-nucleotide"
  modified_base 2..2: /mod_base="OTHER" /note="2'-OMe-nucleotide"
  modified_base 3..3: /mod_base="OTHER" /note="2'-OMe-nucleotide"
  modified_base 4..4: /mod_base="OTHER" /note="2'-fluoro-nucleotide"
  modified_base 5..5: /mod_base="OTHER" /note="2'-OMe-nucleotide"
  modified_base 6..6: /mod_base="OTHER" /note="2'-fluoro-nucleotide"
  modified_base 7..7: /mod_base="OTHER" /note="2'-OMe-nucleotide"
  modified_base 8..8: /mod_base="OTHER" /note="2'-fluoro-nucleotide"
  modified_base 9..9: /mod_base="OTHER" /note="2'-OMe-nucleotide"
  modified_base 10..10: /mod_base="OTHER" /note="2'-fluoro-nucleotide"
  modified_base 11..11: /mod_base="OTHER" /note="2'-OMe-nucleotide"
  modified_base 12..12: /mod_base="OTHER" /note="2'-fluoro-nucleotide"
  modified_base 13..13: /mod_base="OTHER" /note="2'-OMe-nucleotide"
  modified_base 14..14: /mod_base="OTHER" /note="2'-fluoro-nucleotide"
  modified_base 15..15: /mod_base="OTHER" /note="2'-OMe-nucleotide"
  modified_base 16..16: /mod_base="OTHER" /note="2'-fluoro-nucleotide"
  modified_base 17..17: /mod_base="OTHER" /note="2'-OMe-nucleotide"
  modified_base 18..18: /mod_base="OTHER" /note="2'-fluoro-nucleotide"
  modified_base 19..19: /mod_base="OTHER" /note="2'-OMe-nucleotide"
  modified_base 20..20: /mod_base="OTHER" /note="2'-fluoro-nucleotide"
  modified_base 21..21: /mod_base="OTHER" /note="2'-OMe-nucleotide"
  modified_base 22..22: /mod_base="OTHER" /note="2'-fluoro-nucleotide"
  modified_base 23..23: /mod_base="OTHER" /note="Inverted nucleotide"
ccauugaucaagacaauucauct

SEQ ID NO: 595 - DNA, 23 bp, Artificial Sequence
  Description of Artificial Sequence: Synthetic oligonucleotide
  Description of Combined DNA/RNA Molecule: Synthetic oligonucleotide
  N-term hydroxyl group
  C-term hydroxyl group
  modified_base 1..1: /mod_base="OTHER" /note="2'-OMe-nucleotide"
  modified_base 2..2: /mod_base="OTHER" /note="2'-OMe-nucleotide"
  modified_base 3..3: /mod_base="OTHER" /note="2'-OMe-nucleotide"
  modified_base 4..4: /mod_base="OTHER" /note="2'-fluoro-nucleotide"
  modified_base 5..5: /mod_base="OTHER" /note="2'-OMe-nucleotide"
  modified_base 6..6: /mod_base="OTHER" /note="2'-fluoro-nucleotide"
  modified_base 7..7: /mod_base="OTHER" /note="2'-OMe-nucleotide"
  modified_base 8..8: /mod_base="OTHER" /note="2'-fluoro-nucleotide"
  modified_base 9..9: /mod_base="OTHER" /note="2'-OMe-nucleotide"
  modified_base 10..10: /mod_base="OTHER" /note="2'-fluoro-nucleotide"
  modified_base 11..11: /mod_base="OTHER" /note="2'-OMe-nucleotide"
  modified_base 12..12: /mod_base="OTHER" /note="2'-fluoro-nucleotide"
  modified_base 13..13: /mod_base="OTHER" /note="2'-OMe-nucleotide"
  modified_base 14..14: /mod_base="OTHER" /note="2'-fluoro-nucleotide"
  modified_base 15..15: /mod_base="OTHER" /note="2'-OMe-nucleotide"
  modified_base 16..16: /mod_base="OTHER" /note="2'-fluoro-nucleotide"
  modified_base 17..17: /mod_base="OTHER" /note="2'-OMe-nucleotide"
  modified_base 18..18: /mod_base="OTHER" /note="2'-fluoro-nucleotide"
  modified_base 19..19: /mod_base="OTHER" /note="2'-OMe-nucleotide"
  modified_base 20..20: /mod_base="OTHER" /note="2'-fluoro-nucleotide"
  modified_base 21..21: /mod_base="OTHER" /note="2'-OMe-nucleotide"
  modified_base 22..22: /mod_base="OTHER" /note="2'-fluoro-nucleotide"
  modified_base 23..23: /mod_base="OTHER" /note="Inverted nucleotide"
ccaugaucaagacaauucaucat

SEQ ID NO: 596 - DNA, 23 bp, Artificial Sequence
  Description of Artificial Sequence: Synthetic oligonucleotide
  Description of Combined DNA/RNA Molecule: Synthetic oligonucleotide
  N-term hydroxyl group
  C-term hydroxyl group
  modified_base 1..1: /mod_base="OTHER" /note="2'-OMe-nucleotide"
  modified_base 2..2: /mod_base="OTHER" /note="2'-OMe-nucleotide"
  modified_base 3..3: /mod_base="OTHER" /note="2'-OMe-nucleotide"
  modified_base 4..4: /mod_base="OTHER" /note="2'-fluoro-nucleotide"
  modified_base 5..5: /mod_base="OTHER" /note="2'-OMe-nucleotide"
  modified_base 6..6: /mod_base="OTHER" /note="2'-fluoro-nucleotide"
  modified_base 7..7: /mod_base="OTHER" /note="2'-OMe-nucleotide"
  modified_base 8..8: /mod_base="OTHER" /note="2'-fluoro-nucleotide"
  modified_base 9..9: /mod_base="OTHER" /note="2'-OMe-nucleotide"
  modified_base 10..10: /mod_base="OTHER" /note="2'-fluoro-nucleotide"
  modified_base 11..11: /mod_base="OTHER" /note="2'-OMe-nucleotide"
  modified_base 12..12: /mod_base="OTHER" /note="2'-fluoro-nucleotide"
  modified_base 13..13: /mod_base="OTHER" /note="2'-OMe-nucleotide"
  modified_base 14..14: /mod_base="OTHER" /note="2'-fluoro-nucleotide"
  modified_base 15..15: /mod_base="OTHER" /note="2'-OMe-nucleotide"
  modified_base 16..16: /mod_base="OTHER" /note="2'-fluoro-nucleotide"
  modified_base 17..17: /mod_base="OTHER" /note="2'-OMe-nucleotide"
  modified_base 18..18: /mod_base="OTHER" /note="2'-fluoro-nucleotide"
  modified_base 19..19: /mod_base="OTHER" /note="2'-OMe-nucleotide"
  modified_base 20..20: /mod_base="OTHER" /note="2'-fluoro-nucleotide"
  modified_base 21..21: /mod_base="OTHER" /note="2'-OMe-nucleotide"
  modified_base 22..22: /mod_base="OTHER" /note="2'-fluoro-nucleotide"
  modified_base 23..23: /mod_base="OTHER" /note="Inverted nucleotide"
ccagaucaagacaauucaucaut

SEQ ID NO: 597 - DNA, 23 bp, Artificial Sequence
  Description of Artificial Sequence: Synthetic oligonucleotide
  Description of Combined DNA/RNA Molecule: Synthetic oligonucleotide
  N-term hydroxyl group
  C-term hydroxyl group
  modified_base 1..1: /mod_base="OTHER" /note="2'-OMe-nucleotide"
  modified_base 2..2: /mod_base="OTHER" /note="2'-OMe-nucleotide"
  modified_base 3..3: /mod_base="OTHER" /note="2'-OMe-nucleotide"
  modified_base 4..4: /mod_base="OTHER" /note="2'-fluoro-nucleotide"
  modified_base 5..5: /mod_base="OTHER" /note="2'-OMe-nucleotide"
  modified_base 6..6: /mod_base="OTHER" /note="2'-fluoro-nucleotide"
  modified_base 7..7: /mod_base="OTHER" /note="2'-OMe-nucleotide"
  modified_base 8..8: /mod_base="OTHER" /note="2'-fluoro-nucleotide"
  modified_base 9..9: /mod_base="OTHER" /note="2'-OMe-nucleotide"
  modified_base 10..10: /mod_base="OTHER" /note="2'-fluoro-nucleotide"
  modified_base 11..11: /mod_base="OTHER" /note="2'-OMe-nucleotide"
  modified_base 12..12: /mod_base="OTHER" /note="2'-fluoro-nucleotide"
  modified_base 13..13: /mod_base="OTHER" /note="2'-OMe-nucleotide"
  modified_base 14..14: /mod_base="OTHER" /note="2'-fluoro-nucleotide"
  modified_base 15..15: /mod_base="OTHER" /note="2'-OMe-nucleotide"
  modified_base 16..16: /mod_base="OTHER" /note="2'-fluoro-nucleotide"
  modified_base 17..17: /mod_base="OTHER" /note="2'-OMe-nucleotide"
  modified_base 18..18: /mod_base="OTHER" /note="2'-fluoro-nucleotide"
  modified_base 19..19: /mod_base="OTHER" /note="2'-OMe-nucleotide"
  modified_base 20..20: /mod_base="OTHER" /note="2'-fluoro-nucleotide"
  modified_base 21..21: /mod_base="OTHER" /note="2'-OMe-nucleotide"
  modified_base 22..22: /mod_base="OTHER" /note="2'-fluoro-nucleotide"
  modified_base 23..23: /mod_base="OTHER" /note="Inverted nucleotide"
ccaaucaagacaauucaucauut

SEQ ID NO: 598 - DNA, 23 bp, Artificial Sequence
  Description of Artificial Sequence: Synthetic oligonucleotide
  Description of Combined DNA/RNA Molecule: Synthetic oligonucleotide
  N-term hydroxyl group
  C-term hydroxyl group
  modified_base 1..1: /mod_base="OTHER" /note="2'-OMe-nucleotide"
  modified_base 2..2: /mod_base="OTHER" /note="2'-OMe-nucleotide"
  modified_base 3..3: /mod_base="OTHER" /note="2'-OMe-nucleotide"
  modified_base 4..4: /mod_base="OTHER" /note="2'-fluoro-nucleotide"
  modified_base 5..5: /mod_base="OTHER" /note="2'-OMe-nucleotide"
  modified_base 6..6: /mod_base="OTHER" /note="2'-fluoro-nucleotide"
  modified_base 7..7: /mod_base="OTHER" /note="2'-OMe-nucleotide"
  modified_base 8..8: /mod_base="OTHER" /note="2'-fluoro-nucleotide"
  modified_base 9..9: /mod_base="OTHER" /note="2'-OMe-nucleotide"
  modified_base 10..10: /mod_base="OTHER" /note="2'-fluoro-nucleotide"
  modified_base 11..11: /mod_base="OTHER" /note="2'-OMe-nucleotide"
  modified_base 12..12: /mod_base="OTHER" /note="2'-fluoro-nucleotide"
  modified_base 13..13: /mod_base="OTHER" /note="2'-OMe-nucleotide"
  modified_base 14..14: /mod_base="OTHER" /note="2'-fluoro-nucleotide"
  modified_base 15..15: /mod_base="OTHER" /note="2'-OMe-nucleotide"
  modified_base 16..16: /mod_base="OTHER" /note="2'-fluoro-nucleotide"
  modified_base 17..17: /mod_base="OTHER" /note="2'-OMe-nucleotide"
  modified_base 18..18: /mod_base="OTHER" /note="2'-fluoro-nucleotide"
  modified_base 19..19: /mod_base="OTHER" /note="2'-OMe-nucleotide"
  modified_base 20..20: /mod_base="OTHER" /note="2'-fluoro-nucleotide"
  modified_base 21..21: /mod_base="OTHER" /note="2'-OMe-nucleotide"
  modified_base 22..22: /mod_base="OTHER" /note="2'-fluoro-nucleotide"
  modified_base 23..23: /mod_base="OTHER" /note="Inverted nucleotide"
ccaucaagacaauucaucauuut

SEQ ID NO: 599 - DNA, 23 bp, Artificial Sequence
  Description of Artificial Sequence: Synthetic oligonucleotide
  Description of Combined DNA/RNA Molecule: Synthetic oligonucleotide
  N-term hydroxyl group
  C-term hydroxyl group
  modified_base 1..1: /mod_base="OTHER" /note="2'-OMe-nucleotide"
  modified_base 2..2: /mod_base="OTHER" /note="2'-OMe-nucleotide"
  modified_base 3..3: /mod_base="OTHER" /note="2'-OMe-nucleotide"
  modified_base 4..4: /mod_base="OTHER" /note="2'-fluoro-nucleotide"
  modified_base 5..5: /mod_base="OTHER" /note="2'-OMe-nucleotide"
  modified_base 6..6: /mod_base="OTHER" /note="2'-fluoro-nucleotide"
  modified_base 7..7: /mod_base="OTHER" /note="2'-OMe-nucleotide"
  modified_base 8..8: /mod_base="OTHER" /note="2'-fluoro-nucleotide"
  modified_base 9..9: /mod_base="OTHER" /note="2'-OMe-nucleotide"
  modified_base 10..10: /mod_base="OTHER" /note="2'-fluoro-nucleotide"
  modified_base 11..11: /mod_base="OTHER" /note="2'-OMe-nucleotide"
  modified_base 12..12: /mod_base="OTHER" /note="2'-fluoro-nucleotide"
  modified_base 13..13: /mod_base="OTHER" /note="2'-OMe-nucleotide"
  modified_base 14..14: /mod_base="OTHER" /note="2'-fluoro-nucleotide"
  modified_base 15..15: /mod_base="OTHER" /note="2'-OMe-nucleotide"
  modified_base 16..16: /mod_base="OTHER" /note="2'-fluoro-nucleotide"
  modified_base 17..17: /mod_base="OTHER" /note="2'-OMe-nucleotide"
  modified_base 18..18: /mod_base="OTHER" /note="2'-fluoro-nucleotide"
  modified_base 19..19: /mod_base="OTHER" /note="2'-OMe-nucleotide"
  modified_base 20..20: /mod_base="OTHER" /note="2'-fluoro-nucleotide"
  modified_base 21..21: /mod_base="OTHER" /note="2'-OMe-nucleotide"
  modified_base 22..22: /mod_base="OTHER" /note="2'-fluoro-nucleotide"
  modified_base 23..23: /mod_base="OTHER" /note="Inverted nucleotide"
ccaucaucauuugauucucuaut

SEQ ID NO: 600 - DNA, 23 bp, Artificial Sequence
  Description of Artificial Sequence: Synthetic oligonucleotide
  Description of Combined DNA/RNA Molecule: Synthetic oligonucleotide
  N-term hydroxyl group
  C-term hydroxyl group
  modified_base 1..1: /mod_base="OTHER" /note="2'-OMe-nucleotide"
  modified_base 2..2: /mod_base="OTHER" /note="2'-OMe-nucleotide"
  modified_base 3..3: /mod_base="OTHER" /note="2'-OMe-nucleotide"
  modified_base 4..4: /mod_base="OTHER" /note="2'-fluoro-nucleotide"
  modified_base 5..5: /mod_base="OTHER" /note="2'-OMe-nucleotide"
  modified_base 6..6: /mod_base="OTHER" /note="2'-fluoro-nucleotide"
  modified_base 7..7: /mod_base="OTHER" /note="2'-OMe-nucleotide"
  modified_base 8..8: /mod_base="OTHER" /note="2'-fluoro-nucleotide"
  modified_base 9..9: /mod_base="OTHER" /note="2'-OMe-nucleotide"
  modified_base 10..10: /mod_base="OTHER" /note="2'-fluoro-nucleotide"
  modified_base 11..11: /mod_base="OTHER" /note="2'-OMe-nucleotide"
  modified_base 12..12: /mod_base="OTHER" /note="2'-fluoro-nucleotide"
  modified_base 13..13: /mod_base="OTHER" /note="2'-OMe-nucleotide"
  modified_base 14..14: /mod_base="OTHER" /note="2'-fluoro-nucleotide"
  modified_base 15..15: /mod_base="OTHER" /note="2'-OMe-nucleotide"
  modified_base 16..16: /mod_base="OTHER" /note="2'-fluoro-nucleotide"
  modified_base 17..17: /mod_base="OTHER" /note="2'-OMe-nucleotide"
  modified_base 18..18: /mod_base="OTHER" /note="2'-fluoro-nucleotide"
  modified_base 19..19: /mod_base="OTHER" /note="2'-OMe-nucleotide"
  modified_base 20..20: /mod_base="OTHER" /note="2'-fluoro-nucleotide"
  modified_base 21..21: /mod_base="OTHER" /note="2'-OMe-nucleotide"
  modified_base 22..22: /mod_base="OTHER" /note="2'-fluoro-nucleotide"
  modified_base 23..23: /mod_base="OTHER" /note="Inverted nucleotide"
ccacaucauuugauucucuauct

SEQ ID NO: 601 - DNA, 23 bp, Artificial Sequence
  Description of Artificial Sequence: Synthetic oligonucleotide
  Description of Combined DNA/RNA Molecule: Synthetic oligonucleotide
  N-term hydroxyl group
  C-term hydroxyl group
  modified_base 1..1: /mod_base="OTHER" /note="2'-OMe-nucleotide"
  modified_base 2..2: /mod_base="OTHER" /note="2'-OMe-nucleotide"
  modified_base 3..3: /mod_base="OTHER" /note="2'-OMe-nucleotide"
  modified_base 4..4: /mod_base="OTHER" /note="2'-fluoro-nucleotide"
  modified_base 5..5: /mod_base="OTHER" /note="2'-OMe-nucleotide"
  modified_base 6..6: /mod_base="OTHER" /note="2'-fluoro-nucleotide"
  modified_base 7..7: /mod_base="OTHER" /note="2'-OMe-nucleotide"
  modified_base 8..8: /mod_base="OTHER" /note="2'-fluoro-nucleotide"
  modified_base 9..9: /mod_base="OTHER" /note="2'-OMe-nucleotide"
  modified_base 10..10: /mod_base="OTHER" /note="2'-fluoro-nucleotide"
  modified_base 11..11: /mod_base="OTHER" /note="2'-OMe-nucleotide"
  modified_base 12..12: /mod_base="OTHER" /note="2'-fluoro-nucleotide"
  modified_base 13..13: /mod_base="OTHER" /note="2'-OMe-nucleotide"
  modified_base 14..14: /mod_base="OTHER" /note="2'-fluoro-nucleotide"
  modified_base 15..15: /mod_base="OTHER" /note="2'-OMe-nucleotide"
  modified_base 16..16: /mod_base="OTHER" /note="2'-fluoro-nucleotide"
  modified_base 17..17: /mod_base="OTHER" /note="2'-OMe-nucleotide"
  modified_base 18..18: /mod_base="OTHER" /note="2'-fluoro-nucleotide"
  modified_base 19..19: /mod_base="OTHER" /note="2'-OMe-nucleotide"
  modified_base 20..20: /mod_base="OTHER" /note="2'-fluoro-nucleotide"
  modified_base 21..21: /mod_base="OTHER" /note="2'-OMe-nucleotide"
  modified_base 22..22: /mod_base="OTHER" /note="2'-fluoro-nucleotide"
  modified_base 23..23: /mod_base="OTHER" /note="Inverted nucleotide"
ccaaucauuugauucucuaucut

SEQ ID NO: 602 - DNA, 23 bp, Artificial Sequence
  Description of Artificial Sequence: Synthetic oligonucleotide
  Description of Combined DNA/RNA Molecule: Synthetic oligonucleotide
  N-term hydroxyl group
  C-term hydroxyl group
  modified_base 1..1: /mod_base="OTHER" /note="2'-OMe-nucleotide"
  modified_base 2..2: /mod_base="OTHER" /note="2'-OMe-nucleotide"
  modified_base 3..3: /mod_base="OTHER" /note="2'-OMe-nucleotide"
  modified_base 4..4: /mod_base="OTHER" /note="2'-fluoro-nucleotide"
  modified_base 5..5: /mod_base="OTHER" /note="2'-OMe-nucleotide"
  modified_base 6..6: /mod_base="OTHER" /note="2'-fluoro-nucleotide"
  modified_base 7..7: /mod_base="OTHER" /note="2'-OMe-nucleotide"
  modified_base 8..8: /mod_base="OTHER" /note="2'-fluoro-nucleotide"
  modified_base 9..9: /mod_base="OTHER" /note="2'-OMe-nucleotide"
  modified_base 10..10: /mod_base="OTHER" /note="2'-fluoro-nucleotide"
  modified_base 11..11: /mod_base="OTHER" /note="2'-OMe-nucleotide"
  modified_base 12..12: /mod_base="OTHER" /note="2'-fluoro-nucleotide"
  modified_base 13..13: /mod_base="OTHER" /note="2'-OMe-nucleotide"
  modified_base 14..14: /mod_base="OTHER" /note="2'-fluoro-nucleotide"
  modified_base 15..15: /mod_base="OTHER" /note="2'-OMe-nucleotide"
  modified_base 16..16: /mod_base="OTHER" /note="2'-fluoro-nucleotide"
  modified_base 17..17: /mod_base="OTHER" /note="2'-OMe-nucleotide"
  modified_base 18..18: /mod_base="OTHER" /note="2'-fluoro-nucleotide"
  modified_base 19..19: /mod_base="OTHER" /note="2'-OMe-nucleotide"
  modified_base 20..20: /mod_base="OTHER" /note="2'-fluoro-nucleotide"
  modified_base 21..21: /mod_base="OTHER" /note="2'-OMe-nucleotide"
  modified_base 22..22: /mod_base="OTHER" /note="2'-fluoro-nucleotide"
  modified_base 23..23: /mod_base="OTHER" /note="Inverted nucleotide"
ccauagaaaaucagcucagaagt

SEQ ID NO: 603 - DNA, 23 bp, Artificial Sequence
  Description of Artificial Sequence: Synthetic oligonucleotide
  Description of Combined DNA/RNA Molecule: Synthetic oligonucleotide
  N-term hydroxyl group
  C-term hydroxyl group
  modified_base 1..1: /mod_base="OTHER" /note="2'-OMe-nucleotide"
  modified_base 2..2: /mod_base="OTHER" /note="2'-OMe-nucleotide"
  modified_base 3..3: /mod_base="OTHER" /note="2'-OMe-nucleotide"
  modified_base 4..4: /mod_base="OTHER" /note="2'-fluoro-nucleotide"
  modified_base 5..5: /mod_base="OTHER" /note="2'-OMe-nucleotide"
  modified_base 6..6: /mod_base="OTHER" /note="2'-fluoro-nucleotide"
  modified_base 7..7: /mod_base="OTHER" /note="2'-OMe-nucleotide"
  modified_base 8..8: /mod_base="OTHER" /note="2'-fluoro-nucleotide"
  modified_base 9..9: /mod_base="OTHER" /note="2'-OMe-nucleotide"
  modified_base 10..10: /mod_base="OTHER" /note="2'-fluoro-nucleotide"
  modified_base 11..11: /mod_base="OTHER" /note="2'-OMe-nucleotide"
  modified_base 12..12: /mod_base="OTHER" /note="2'-fluoro-nucleotide"
  modified_base 13..13: /mod_base="OTHER" /note="2'-OMe-nucleotide"
  modified_base 14..14: /mod_base="OTHER" /note="2'-fluoro-nucleotide"
  modified_base 15..15: /mod_base="OTHER" /note="2'-OMe-nucleotide"
  modified_base 16..16: /mod_base="OTHER" /note="2'-fluoro-nucleotide"
  modified_base 17..17: /mod_base="OTHER" /note="2'-OMe-nucleotide"
  modified_base 18..18: /mod_base="OTHER" /note="2'-fluoro-nucleotide"
  modified_base 19..19: /mod_base="OTHER" /note="2'-OMe-nucleotide"
  modified_base 20..20: /mod_base="OTHER" /note="2'-fluoro-nucleotide"
  modified_base 21..21: /mod_base="OTHER" /note="2'-OMe-nucleotide"
  modified_base 22..22: /mod_base="OTHER" /note="2'-fluoro-nucleotide"
  modified_base 23..23: /mod_base="OTHER" /note="Inverted nucleotide"
ccagaaaaucagcucagaaggat

SEQ ID NO: 604 - DNA, 23 bp, Artificial Sequence
  Description of Artificial Sequence: Synthetic oligonucleotide
  Description of Combined DNA/RNA Molecule: Synthetic oligonucleotide
  N-term hydroxyl group
  C-term hydroxyl group
  modified_base 1..1: /mod_base="OTHER" /note="2'-OMe-nucleotide"
  modified_base 2..2: /mod_base="OTHER" /note="2'-OMe-nucleotide"
  modified_base 3..3: /mod_base="OTHER" /note="2'-OMe-nucleotide"
  modified_base 4..4: /mod_base="OTHER" /note="2'-fluoro-nucleotide"
  modified_base 5..5: /mod_base="OTHER" /note="2'-OMe-nucleotide"
  modified_base 6..6: /mod_base="OTHER" /note="2'-fluoro-nucleotide"
  modified_base 7..7: /mod_base="OTHER" /note="2'-OMe-nucleotide"
  modified_base 8..8: /mod_base="OTHER" /note="2'-fluoro-nucleotide"
  modified_base 9..9: /mod_base="OTHER" /note="2'-OMe-nucleotide"
  modified_base 10..10: /mod_base="OTHER" /note="2'-fluoro-nucleotide"
  modified_base 11..11: /mod_base="OTHER" /note="2'-OMe-nucleotide"
  modified_base 12..12: /mod_base="OTHER" /note="2'-fluoro-nucleotide"
  modified_base 13..13: /mod_base="OTHER" /note="2'-OMe-nucleotide"
  modified_base 14..14: /mod_base="OTHER" /note="2'-fluoro-nucleotide"
  modified_base 15..15: /mod_base="OTHER" /note="2'-OMe-nucleotide"
  modified_base 16..16: /mod_base="OTHER" /note="2'-fluoro-nucleotide"
  modified_base 17..17: /mod_base="OTHER" /note="2'-OMe-nucleotide"
  modified_base 18..18: /mod_base="OTHER" /note="2'-fluoro-nucleotide"
  modified_base 19..19: /mod_base="OTHER" /note="2'-OMe-nucleotide"
  modified_base 20..20: /mod_base="OTHER" /note="2'-fluoro-nucleotide"
  modified_base 21..21: /mod_base="OTHER" /note="2'-OMe-nucleotide"
  modified_base 22..22: /mod_base="OTHER" /note="2'-fluoro-nucleotide"
  modified_base 23..23: /mod_base="OTHER" /note="Inverted nucleotide"
ccaaaaaucagcucagaaggact

SEQ ID NO: 605 - DNA, 23 bp, Artificial Sequence
  Description of Artificial Sequence: Synthetic oligonucleotide
  Description of Combined DNA/RNA Molecule: Synthetic oligonucleotide
  N-term hydroxyl group
  C-term hydroxyl group
  modified_base 1..1: /mod_base="OTHER" /note="2'-OMe-nucleotide"
  modified_base 2..2: /mod_base="OTHER" /note="2'-OMe-nucleotide"
  modified_base 3..3: /mod_base="OTHER" /note="2'-OMe-nucleotide"
  modified_base 4..4: /mod_base="OTHER" /note="2'-fluoro-nucleotide"
  modified_base 5..5: /mod_base="OTHER" /note="2'-OMe-nucleotide"
  modified_base 6..6: /mod_base="OTHER" /note="2'-fluoro-nucleotide"
  modified_base 7..7: /mod_base="OTHER" /note="2'-OMe-nucleotide"
  modified_base 8..8: /mod_base="OTHER" /note="2'-fluoro-nucleotide"
  modified_base 9..9: /mod_base="OTHER" /note="2'-OMe-nucleotide"
  modified_base 10..10: /mod_base="OTHER" /note="2'-fluoro-nucleotide"
  modified_base 11..11: /mod_base="OTHER" /note="2'-OMe-nucleotide"
  modified_base 12..12: /mod_base="OTHER" /note="2'-fluoro-nucleotide"
  modified_base 13..13: /mod_base="OTHER" /note="2'-OMe-nucleotide"
  modified_base 14..14: /mod_base="OTHER" /note="2'-fluoro-nucleotide"
  modified_base 15..15: /mod_base="OTHER" /note="2'-OMe-nucleotide"
  modified_base 16..16: /mod_base="OTHER" /note="2'-fluoro-nucleotide"
  modified_base 17..17: /mod_base="OTHER" /note="2'-OMe-nucleotide"
  modified_base 18..18: /mod_base="OTHER" /note="2'-fluoro-nucleotide"
  modified_base 19..19: /mod_base="OTHER" /note="2'-OMe-nucleotide"
  modified_base 20..20: /mod_base="OTHER" /note="2'-fluoro-nucleotide"
  modified_base 21..21: /mod_base="OTHER" /note="2'-OMe-nucleotide"
  modified_base 22..22: /mod_base="OTHER" /note="2'-fluoro-nucleotide"
  modified_base 23..23: /mod_base="OTHER" /note="Inverted nucleotide"
ccaaaaucagcucagaaggacut

SEQ ID NO: 606 - DNA, 23 bp, Artificial Sequence
  Description of Artificial Sequence: Synthetic oligonucleotide
  Description of Combined DNA/RNA Molecule: Synthetic oligonucleotide
  N-term hydroxyl group
  C-term hydroxyl group
  modified_base 1..1: /mod_base="OTHER" /note="2'-OMe-nucleotide"
  modified_base 2..2: /mod_base="OTHER" /note="2'-OMe-nucleotide"
  modified_base 3..3: /mod_base="OTHER" /note="2'-OMe-nucleotide"
  modified_base 4..4: /mod_base="OTHER" /note="2'-fluoro-nucleotide"
  modified_base 5..5: /mod_base="OTHER" /note="2'-OMe-nucleotide"
  modified_base 6..6: /mod_base="OTHER" /note="2'-fluoro-nucleotide"
  modified_base 7..7: /mod_base="OTHER" /note="2'-OMe-nucleotide"
  modified_base 8..8: /mod_base="OTHER" /note="2'-fluoro-nucleotide"
  modified_base 9..9: /mod_base="OTHER" /note="2'-OMe-nucleotide"
  modified_base 10..10: /mod_base="OTHER" /note="2'-fluoro-nucleotide"
  modified_base 11..11: /mod_base="OTHER" /note="2'-OMe-nucleotide"
  modified_base 12..12: /mod_base="OTHER" /note="2'-fluoro-nucleotide"
  modified_base 13..13: /mod_base="OTHER" /note="2'-OMe-nucleotide"
  modified_base 14..14: /mod_base="OTHER" /note="2'-fluoro-nucleotide"
  modified_base 15..15: /mod_base="OTHER" /note="2'-OMe-nucleotide"
  modified_base 16..16: /mod_base="OTHER" /note="2'-fluoro-nucleotide"
  modified_base 17..17: /mod_base="OTHER" /note="2'-OMe-nucleotide"
  modified_base 18..18: /mod_base="OTHER" /note="2'-fluoro-nucleotide"
  modified_base 19..19: /mod_base="OTHER" /note="2'-OMe-nucleotide"
  modified_base 20..20: /mod_base="OTHER" /note="2'-fluoro-nucleotide"
  modified_base 21..21: /mod_base="OTHER" /note="2'-OMe-nucleotide"
  modified_base 22..22: /mod_base="OTHER" /note="2'-fluoro-nucleotide"
  modified_base 23..23: /mod_base="OTHER" /note="Inverted nucleotide"
ccaaaucagcucagaaggacuat

SEQ ID NO: 607 - DNA, 23 bp, Artificial Sequence
  Description of Artificial Sequence: Synthetic oligonucleotide
  Description of Combined DNA/RNA Molecule: Synthetic oligonucleotide
  N-term hydroxyl group
  C-term hydroxyl group
  modified_base 1..1: /mod_base="OTHER" /note="2'-OMe-nucleotide"
  modified_base 2..2: /mod_base="OTHER" /note="2'-OMe-nucleotide"
  modified_base 3..3: /mod_base="OTHER" /note="2'-OMe-nucleotide"
  modified_base 4..4: /mod_base="OTHER" /note="2'-fluoro-nucleotide"
  modified_base 5..5: /mod_base="OTHER" /note="2'-OMe-nucleotide"
  modified_base 6..6: /mod_base="OTHER" /note="2'-fluoro-nucleotide"
  modified_base 7..7: /mod_base="OTHER" /note="2'-OMe-nucleotide"
  modified_base 8..8: /mod_base="OTHER" /note="2'-fluoro-nucleotide"
  modified_base 9..9: /mod_base="OTHER" /note="2'-OMe-nucleotide"
  modified_base 10..10: /mod_base="OTHER" /note="2'-fluoro-nucleotide"
  modified_base 11..11: /mod_base="OTHER" /note="2'-OMe-nucleotide"
  modified_base 12..12: /mod_base="OTHER" /note="2'-fluoro-nucleotide"
  modified_base 13..13: /mod_base="OTHER" /note="2'-OMe-nucleotide"
  modified_base 14..14: /mod_base="OTHER" /note="2'-fluoro-nucleotide"
  modified_base 15..15: /mod_base="OTHER" /note="2'-OMe-nucleotide"
  modified_base 16..16: /mod_base="OTHER" /note="2'-fluoro-nucleotide"
  modified_base 17..17: /mod_base="OTHER" /note="2'-OMe-nucleotide"
  modified_base 18..18: /mod_base="OTHER" /note="2'-fluoro-nucleotide"
  modified_base 19..19: /mod_base="OTHER" /note="2'-OMe-nucleotide"
  modified_base 20..20: /mod_base="OTHER" /note="2'-fluoro-nucleotide"
  modified_base 21..21: /mod_base="OTHER" /note="2'-OMe-nucleotide"
  modified_base 22..22: /mod_base="OTHER" /note="2'-fluoro-nucleotide"
  modified_base 23..23: /mod_base="OTHER" /note="Inverted nucleotide"
ccagauggcauuccugcugaaut

SEQ ID NO: 608 - DNA, 23 bp, Artificial Sequence
  Description of Artificial Sequence: Synthetic oligonucleotide
  Description of Combined DNA/RNA Molecule: Synthetic oligonucleotide
  N-term hydroxyl group
  C-term hydroxyl group
  modified_base 1..1: /mod_base="OTHER" /note="2'-OMe-nucleotide"
  modified_base 2..2: /mod_base="OTHER" /note="2'-OMe-nucleotide"
  modified_base 3..3: /mod_base="OTHER" /note="2'-OMe-nucleotide"
  modified_base 4..4: /mod_base="OTHER" /note="2'-fluoro-nucleotide"
  modified_base 5..5: /mod_base="OTHER" /note="2'-OMe-nucleotide"
  modified_base 6..6: /mod_base="OTHER" /note="2'-fluoro-nucleotide"
  modified_base 7..7: /mod_base="OTHER" /note="2'-OMe-nucleotide"
  modified_base 8..8: /mod_base="OTHER" /note="2'-fluoro-nucleotide"
  modified_base 9..9: /mod_base="OTHER" /note="2'-OMe-nucleotide"
  modified_base 10..10: /mod_base="OTHER" /note="2'-fluoro-nucleotide"
  modified_base 11..11: /mod_base="OTHER" /note="2'-OMe-nucleotide"
  modified_base 12..12: /mod_base="OTHER" /note="2'-fluoro-nucleotide"
  modified_base 13..13: /mod_base="OTHER" /note="2'-OMe-nucleotide"
  modified_base 14..14: /mod_base="OTHER" /note="2'-fluoro-nucleotide"
  modified_base 15..15: /mod_base="OTHER" /note="2'-OMe-nucleotide"
  modified_base 16..16: /mod_base="OTHER" /note="2'-fluoro-nucleotide"
  modified_base 17..17: /mod_base="OTHER" /note="2'-OMe-nucleotide"
  modified_base 18..18: /mod_base="OTHER" /note="2'-fluoro-nucleotide"
  modified_base 19..19: /mod_base="OTHER" /note="2'-OMe-nucleotide"
  modified_base 20..20: /mod_base="OTHER" /note="2'-fluoro-nucleotide"
  modified_base 21..21: /mod_base="OTHER" /note="2'-OMe-nucleotide"
  modified_base 22..22: /mod_base="OTHER" /note="2'-fluoro-nucleotide"
  modified_base 23..23: /mod_base="OTHER" /note="Inverted nucleotide"
ccacauuccugcugaauguacct

SEQ ID NO: 609 - DNA, 23 bp, Artificial Sequence
  Description of Artificial Sequence: Synthetic oligonucleotide
  Description of Combined DNA/RNA Molecule: Synthetic oligonucleotide
  N-term hydroxyl group
  C-term hydroxyl group
  modified_base 1..1: /mod_base="OTHER" /note="2'-OMe-nucleotide"
  modified_base 2..2: /mod_base="OTHER" /note="2'-OMe-nucleotide"
  modified_base 3..3: /mod_base="OTHER" /note="2'-OMe-nucleotide"
  modified_base 4..4: /mod_base="OTHER" /note="2'-fluoro-nucleotide"
  modified_base 5..5: /mod_base="OTHER" /note="2'-OMe-nucleotide"
  modified_base 6..6: /mod_base="OTHER" /note="2'-fluoro-nucleotide"
  modified_base 7..7: /mod_base="OTHER" /note="2'-OMe-nucleotide"
  modified_base 8..8: /mod_base="OTHER" /note="2'-fluoro-nucleotide"
  modified_base 9..9: /mod_base="OTHER" /note="2'-OMe-nucleotide"
  modified_base 10..10: /mod_base="OTHER" /note="2'-fluoro-nucleotide"
  modified_base 11..11: /mod_base="OTHER" /note="2'-OMe-nucleotide"
  modified_base 12..12: /mod_base="OTHER" /note="2'-fluoro-nucleotide"
  modified_base 13..13: /mod_base="OTHER" /note="2'-OMe-nucleotide"
  modified_base 14..14: /mod_base="OTHER" /note="2'-fluoro-nucleotide"
  modified_base 15..15: /mod_base="OTHER" /note="2'-OMe-nucleotide"
  modified_base 16..16: /mod_base="OTHER" /note="2'-fluoro-nucleotide"
  modified_base 17..17: /mod_base="OTHER" /note="2'-OMe-nucleotide"
  modified_base 18..18: /mod_base="OTHER" /note="2'-fluoro-nucleotide"
  modified_base 19..19: /mod_base="OTHER" /note="2'-OMe-nucleotide"
  modified_base 20..20: /mod_base="OTHER" /note="2'-fluoro-nucleotide"
  modified_base 21..21: /mod_base="OTHER" /note="2'-OMe-nucleotide"
  modified_base 22..22: /mod_base="OTHER" /note="2'-fluoro-nucleotide"
  modified_base 23..23: /mod_base="OTHER" /note="Inverted nucleotide"
ccauccugcugaauguaccacct

SEQ ID NO: 610 - DNA, 23 bp, Artificial Sequence
  Description of Artificial Sequence: Synthetic oligonucleotide
  Description of Combined DNA/RNA Molecule: Synthetic oligonucleotide
  N-term hydroxyl group
  C-term hydroxyl group
  modified_base 1..1: /mod_base="OTHER" /note="2'-OMe-nucleotide"
  modified_base 2..2: /mod_base="OTHER" /note="2'-OMe-nucleotide"
  modified_base 3..3: /mod_base="OTHER" /note="2'-OMe-nucleotide"
  modified_base 4..4: /mod_base="OTHER" /note="2'-fluoro-nucleotide"
  modified_base 5..5: /mod_base="OTHER" /note="2'-OMe-nucleotide"
  modified_base 6..6: /mod_base="OTHER" /note="2'-fluoro-nucleotide"
  modified_base 7..7: /mod_base="OTHER" /note="2'-OMe-nucleotide"
  modified_base 8..8: /mod_base="OTHER" /note="2'-fluoro-nucleotide"
  modified_base 9..9: /mod_base="OTHER" /note="2'-OMe-nucleotide"
  modified_base 10..10: /mod_base="OTHER" /note="2'-fluoro-nucleotide"
  modified_base 11..11: /mod_base="OTHER" /note="2'-OMe-nucleotide"
  modified_base 12..12: /mod_base="OTHER" /note="2'-fluoro-nucleotide"
  modified_base 13..13: /mod_base="OTHER" /note="2'-OMe-nucleotide"
  modified_base 14..14: /mod_base="OTHER" /note="2'-fluoro-nucleotide"
  modified_base 15..15: /mod_base="OTHER" /note="2'-OMe-nucleotide"
  modified_base 16..16: /mod_base="OTHER" /note="2'-fluoro-nucleotide"
  modified_base 17..17: /mod_base="OTHER" /note="2'-OMe-nucleotide"
  modified_base 18..18: /mod_base="OTHER" /note="2'-fluoro-nucleotide"
  modified_base 19..19: /mod_base="OTHER" /note="2'-OMe-nucleotide"
  modified_base 20..20: /mod_base="OTHER" /note="2'-fluoro-nucleotide"
  modified_base 21..21: /mod_base="OTHER" /note="2'-OMe-nucleotide"
  modified_base 22..22: /mod_base="OTHER" /note="2'-fluoro-nucleotide"
  modified_base 23..23: /mod_base="OTHER" /note="Inverted nucleotide"
ccacugcugaauguaccaccaut

SEQ ID NO: 611 - DNA, 23 bp, Artificial Sequence
  Description of Artificial Sequence: Synthetic oligonucleotide
  Description of Combined DNA/RNA Molecule: Synthetic oligonucleotide
  N-term hydroxyl group
  C-term hydroxyl group
  modified_base 1..1: /mod_base="OTHER" /note="2'-OMe-nucleotide"
  modified_base 2..2: /mod_base="OTHER" /note="2'-OMe-nucleotide"
  modified_base 3..3: /mod_base="OTHER" /note="2'-OMe-nucleotide"
  modified_base 4..4: /mod_base="OTHER" /note="2'-fluoro-nucleotide"
  modified_base 5..5: /mod_base="OTHER" /note="2'-OMe-nucleotide"
  modified_base 6..6: /mod_base="OTHER" /note="2'-fluoro-nucleotide"
  modified_base 7..7: /mod_base="OTHER" /note="2'-OMe-nucleotide"
  modified_base 8..8: /mod_base="OTHER" /note="2'-fluoro-nucleotide"
  modified_base 9..9: /mod_base="OTHER" /note="2'-OMe-nucleotide"
  modified_base 10..10: /mod_base="OTHER" /note="2'-fluoro-nucleotide"
  modified_base 11..11: /mod_base="OTHER" /note="2'-OMe-nucleotide"
  modified_base 12..12: /mod_base="OTHER" /note="2'-fluoro-nucleotide"
  modified_base 13..13: /mod_base="OTHER" /note="2'-OMe-nucleotide"
  modified_base 14..14: /mod_base="OTHER" /note="2'-fluoro-nucleotide"
  modified_base 15..15: /mod_base="OTHER" /note="2'-OMe-nucleotide"
  modified_base 16..16: /mod_base="OTHER" /note="2'-fluoro-nucleotide"
  modified_base 17..17: /mod_base="OTHER" /note="2'-OMe-nucleotide"
  modified_base 18..18: /mod_base="OTHER" /note="2'-fluoro-nucleotide"
  modified_base 19..19: /mod_base="OTHER" /note="2'-OMe-nucleotide"
  modified_base 20..20: /mod_base="OTHER" /note="2'-fluoro-nucleotide"
  modified_base 21..21: /mod_base="OTHER" /note="2'-OMe-nucleotide"
  modified_base 22..22: /mod_base="OTHER" /note="2'-fluoro-nucleotide"
  modified_base 23..23: /mod_base="OTHER" /note="Inverted nucleotide"
ccaugcugaauguaccaccauut

SEQ ID NO: 612 - DNA, 23 bp, Artificial Sequence
  Description of Artificial Sequence: Synthetic oligonucleotide
  Description of Combined DNA/RNA Molecule: Synthetic oligonucleotide
  N-term hydroxyl group
  C-term hydroxyl group
  modified_base 1..1: /mod_base="OTHER" /note="2'-OMe-nucleotide"
  modified_base 2..2: /mod_base="OTHER" /note="2'-OMe-nucleotide"
  modified_base 3..3: /mod_base="OTHER" /note="2'-OMe-nucleotide"
  modified_base 4..4: /mod_base="OTHER" /note="2'-fluoro-nucleotide"
  modified_base 5..5: /mod_base="OTHER" /note="2'-OMe-nucleotide"
  modified_base 6..6: /mod_base="OTHER" /note="2'-fluoro-nucleotide"
  modified_base 7..7: /mod_base="OTHER" /note="2'-OMe-nucleotide"
  modified_base 8..8: /mod_base="OTHER" /note="2'-fluoro-nucleotide"
  modified_base 9..9: /mod_base="OTHER" /note="2'-OMe-nucleotide"
  modified_base 10..10: /mod_base="OTHER" /note="2'-fluoro-nucleotide"
  modified_base 11..11: /mod_base="OTHER" /note="2'-OMe-nucleotide"
  modified_base 12..12: /mod_base="OTHER" /note="2'-fluoro-nucleotide"
  modified_base 13..13: /mod_base="OTHER" /note="2'-OMe-nucleotide"
  modified_base 14..14: /mod_base="OTHER" /note="2'-fluoro-nucleotide"
  modified_base 15..15: /mod_base="OTHER" /note="2'-OMe-nucleotide"
  modified_base 16..16: /mod_base="OTHER" /note="2'-fluoro-nucleotide"
  modified_base 17..17: /mod_base="OTHER" /note="2'-OMe-nucleotide"
  modified_base 18..18: /mod_base="OTHER" /note="2'-fluoro-nucleotide"
  modified_base 19..19: /mod_base="OTHER" /note="2'-OMe-nucleotide"
  modified_base 20..20: /mod_base="OTHER" /note="2'-fluoro-nucleotide"
  modified_base 21..21: /mod_base="OTHER" /note="2'-OMe-nucleotide"
  modified_base 22..22: /mod_base="OTHER" /note="2'-fluoro-nucleotide"
  modified_base 23..23: /mod_base="OTHER" /note="Inverted nucleotide"
ccagcugaauguaccaccauuut

SEQ ID NO: 613 - DNA, 23 bp, Artificial Sequence
  Description of Artificial Sequence: Synthetic oligonucleotide
  Description of Combined DNA/RNA Molecule: Synthetic oligonucleotide
  N-term hydroxyl group
  C-term hydroxyl group
  modified_base 1..1: /mod_base="OTHER" /note="2'-OMe-nucleotide"
  modified_base 2..2: /mod_base="OTHER" /note="2'-OMe-nucleotide"
  modified_base 3..3: /mod_base="OTHER" /note="2'-OMe-nucleotide"
  modified_base 4..4: /mod_base="OTHER" /note="2'-fluoro-nucleotide"
  modified_base 5..5: /mod_base="OTHER" /note="2'-OMe-nucleotide"
  modified_base 6..6: /mod_base="OTHER" /note="2'-fluoro-nucleotide"
  modified_base 7..7: /mod_base="OTHER" /note="2'-OMe-nucleotide"
  modified_base 8..8: /mod_base="OTHER" /note="2'-fluoro-nucleotide"
  modified_base 9..9: /mod_base="OTHER" /note="2'-OMe-nucleotide"
  modified_base 10..10: /mod_base="OTHER" /note="2'-fluoro-nucleotide"
  modified_base 11..11: /mod_base="OTHER" /note="2'-OMe-nucleotide"
  modified_base 12..12: /mod_base="OTHER" /note="2'-fluoro-nucleotide"
  modified_base 13..13: /mod_base="OTHER" /note="2'-OMe-nucleotide"
  modified_base 14..14: /mod_base="OTHER" /note="2'-fluoro-nucleotide"
  modified_base 15..15: /mod_base="OTHER" /note="2'-OMe-nucleotide"
  modified_base 16..16: /mod_base="OTHER" /note="2'-fluoro-nucleotide"
  modified_base 17..17: /mod_base="OTHER" /note="2'-OMe-nucleotide"
  modified_base 18..18: /mod_base="OTHER" /note="2'-fluoro-nucleotide"
  modified_base 19..19: /mod_base="OTHER" /note="2'-OMe-nucleotide"
  modified_base 20..20: /mod_base="OTHER" /note="2'-fluoro-nucleotide"
  modified_base 21..21: /mod_base="OTHER" /note="2'-OMe-nucleotide"
  modified_base 22..22: /mod_base="OTHER" /note="2'-fluoro-nucleotide"
  modified_base 23..23: /mod_base="OTHER" /note="Inverted nucleotide"
ccacugaauguaccaccauuuat

SEQ ID NO: 614 - DNA, 23 bp, Artificial Sequence
  Description of Artificial Sequence: Synthetic oligonucleotide
  Description of Combined DNA/RNA Molecule: Synthetic oligonucleotide
  N-term hydroxyl group
  C-term hydroxyl group
  modified_base 1..1: /mod_base="OTHER" /note="2'-OMe-nucleotide"
  modified_base 2..2: /mod_base="OTHER" /note="2'-OMe-nucleotide"
  modified_base 3..3: /mod_base="OTHER" /note="2'-OMe-nucleotide"
  modified_base 4..4: /mod_base="OTHER" /note="2'-fluoro-nucleotide"
  modified_base 5..5: /mod_base="OTHER" /note="2'-OMe-nucleotide"
  modified_base 6..6: /mod_base="OTHER" /note="2'-fluoro-nucleotide"
  modified_base 7..7: /mod_base="OTHER" /note="2'-OMe-nucleotide"
  modified_base 8..8: /mod_base="OTHER" /note="2'-fluoro-nucleotide"
  modified_base 9..9: /mod_base="OTHER" /note="2'-OMe-nucleotide"
  modified_base 10..10: /mod_base="OTHER" /note="2'-fluoro-nucleotide"
  modified_base 11..11: /mod_base="OTHER" /note="2'-OMe-nucleotide"
  modified_base 12..12: /mod_base="OTHER" /note="2'-fluoro-nucleotide"
  modified_base 13..13: /mod_base="OTHER" /note="2'-OMe-nucleotide"
  modified_base 14..14: /mod_base="OTHER" /note="2'-fluoro-nucleotide"
  modified_base 15..15: /mod_base="OTHER" /note="2'-OMe-nucleotide"
  modified_base 16..16: /mod_base="OTHER" /note="2'-fluoro-nucleotide"
  modified_base 17..17: /mod_base="OTHER" /note="2'-OMe-nucleotide"
  modified_base 18..18: /mod_base="OTHER" /note="2'-fluoro-nucleotide"
  modified_base 19..19: /mod_base="OTHER" /note="2'-OMe-nucleotide"
  modified_base 20..20: /mod_base="OTHER" /note="2'-fluoro-nucleotide"
  modified_base 21..21: /mod_base="OTHER" /note="2'-OMe-nucleotide"
  modified_base 22..22: /mod_base="OTHER" /note="2'-fluoro-nucleotide"
  modified_base 23..23: /mod_base="OTHER" /note="Inverted nucleotide"
ccaagaggugaacauacaagugt

SEQ ID NO: 615 - DNA, 23 bp, Artificial Sequence
  Description of Artificial Sequence: Synthetic oligonucleotide
  Description of Combined DNA/RNA Molecule: Synthetic oligonucleotide
  N-term hydroxyl group
  C-term hydroxyl group
  modified_base 1..1: /mod_base="OTHER" /note="2'-OMe-nucleotide"
  modified_base 2..2: /mod_base="OTHER" /note="2'-OMe-nucleotide"
  modified_base 3..3: /mod_base="OTHER" /note="2'-OMe-nucleotide"
  modified_base 4..4: /mod_base="OTHER" /note="2'-fluoro-nucleotide"
  modified_base 5..5: /mod_base="OTHER" /note="2'-OMe-nucleotide"
  modified_base 6..6: /mod_base="OTHER" /note="2'-fluoro-nucleotide"
  modified_base 7..7: /mod_base="OTHER" /note="2'-OMe-nucleotide"
  modified_base 8..8: /mod_base="OTHER" /note="2'-fluoro-nucleotide"
  modified_base 9..9: /mod_base="OTHER" /note="2'-OMe-nucleotide"
  modified_base 10..10: /mod_base="OTHER" /note="2'-fluoro-nucleotide"
  modified_base 11..11: /mod_base="OTHER" /note="2'-OMe-nucleotide"
  modified_base 12..12: /mod_base="OTHER" /note="2'-fluoro-nucleotide"
  modified_base 13..13: /mod_base="OTHER" /note="2'-OMe-nucleotide"
  modified_base 14..14: /mod_base="OTHER" /note="2'-fluoro-nucleotide"
  modified_base 15..15: /mod_base="OTHER" /note="2'-OMe-nucleotide"
  modified_base 16..16: /mod_base="OTHER" /note="2'-fluoro-nucleotide"
  modified_base 17..17: /mod_base="OTHER" /note="2'-OMe-nucleotide"
  modified_base 18..18: /mod_base="OTHER" /note="2'-fluoro-nucleotide"
  modified_base 19..19: /mod_base="OTHER" /note="2'-OMe-nucleotide"
  modified_base 20..20: /mod_base="OTHER" /note="2'-fluoro-nucleotide"
  modified_base 21..21: /mod_base="OTHER" /note="2'-OMe-nucleotide"
  modified_base 22..22: /mod_base="OTHER" /note="2'-fluoro-nucleotide"
  modified_base 23..23: /mod_base="OTHER" /note="Inverted nucleotide"
ccagaggugaacauacaaguggt

SEQ ID NO: 616 - DNA, 23 bp, Artificial Sequence
  Description of Artificial Sequence: Synthetic oligonucleotide
  Description of Combined DNA/RNA Molecule: Synthetic oligonucleotide
  N-term hydroxyl group
  C-term hydroxyl group
  modified_base 1..1: /mod_base="OTHER" /note="2'-OMe-nucleotide"
  modified_base 2..2: /mod_base="OTHER" /note="2'-OMe-nucleotide"
  modified_base 3..3: /mod_base="OTHER" /note="2'-OMe-nucleotide"
  modified_base 4..4: /mod_base="OTHER" /note="2'-fluoro-nucleotide"
  modified_base 5..5: /mod_base="OTHER" /note="2'-OMe-nucleotide"
  modified_base 6..6: /mod_base="OTHER" /note="2'-fluoro-nucleotide"
  modified_base 7..7: /mod_base="OTHER" /note="2'-OMe-nucleotide"
  modified_base 8..8: /mod_base="OTHER" /note="2'-fluoro-nucleotide"
  modified_base 9..9: /mod_base="OTHER" /note="2'-OMe-nucleotide"
  modified_base 10..10: /mod_base="OTHER" /note="2'-fluoro-nucleotide"
  modified_base 11..11: /mod_base="OTHER" /note="2'-OMe-nucleotide"
  modified_base 12..12: /mod_base="OTHER" /note="2'-fluoro-nucleotide"
  modified_base 13..13: /mod_base="OTHER" /note="2'-OMe-nucleotide"
  modified_base 14..14: /mod_base="OTHER" /note="2'-fluoro-nucleotide"
  modified_base 15..15: /mod_base="OTHER" /note="2'-OMe-nucleotide"
  modified_base 16..16: /mod_base="OTHER" /note="2'-fluoro-nucleotide"
  modified_base 17..17: /mod_base="OTHER" /note="2'-OMe-nucleotide"
  modified_base 18..18: /mod_base="OTHER" /note="2'-fluoro-nucleotide"
  modified_base 19..19: /mod_base="OTHER" /note="2'-OMe-nucleotide"
  modified_base 20..20: /mod_base="OTHER" /note="2'-fluoro-nucleotide"
  modified_base 21..21: /mod_base="OTHER" /note="2'-OMe-nucleotide"
  modified_base 22..22: /mod_base="OTHER" /note="2'-fluoro-nucleotide"
  modified_base 23..23: /mod_base="OTHER" /note="Inverted nucleotide"
ccaaggugaacauacaaguggct

SEQ ID NO: 617 - DNA, 23 bp, Artificial Sequence
  Description of Artificial Sequence: Synthetic oligonucleotide
  Description of Combined DNA/RNA Molecule: Synthetic oligonucleotide
  N-term hydroxyl group
  C-term hydroxyl group
  modified_base 1..1: /mod_base="OTHER" /note="2'-OMe-nucleotide"
  modified_base 2..2: /mod_base="OTHER" /note="2'-OMe-nucleotide"
  modified_base 3..3: /mod_base="OTHER" /note="2'-OMe-nucleotide"
  modified_base 4..4: /mod_base="OTHER" /note="2'-fluoro-nucleotide"
  modified_base 5..5: /mod_base="OTHER" /note="2'-OMe-nucleotide"
  modified_base 6..6: /mod_base="OTHER" /note="2'-fluoro-nucleotide"
  modified_base 7..7: /mod_base="OTHER" /note="2'-OMe-nucleotide"
  modified_base 8..8: /mod_base="OTHER" /note="2'-fluoro-nucleotide"
  modified_base 9..9: /mod_base="OTHER" /note="2'-OMe-nucleotide"
  modified_base 10..10: /mod_base="OTHER" /note="2'-fluoro-nucleotide"
  modified_base 11..11: /mod_base="OTHER" /note="2'-OMe-nucleotide"
  modified_base 12..12: /mod_base="OTHER" /note="2'-fluoro-nucleotide"
  modified_base 13..13: /mod_base="OTHER" /note="2'-OMe-nucleotide"
  modified_base 14..14: /mod_base="OTHER" /note="2'-fluoro-nucleotide"
  modified_base 15..15: /mod_base="OTHER" /note="2'-OMe-nucleotide"
  modified_base 16..16: /mod_base="OTHER" /note="2'-fluoro-nucleotide"
  modified_base 17..17: /mod_base="OTHER" /note="2'-OMe-nucleotide"
  modified_base 18..18: /mod_base="OTHER" /note="2'-fluoro-nucleotide"
  modified_base 19..19: /mod_base="OTHER" /note="2'-OMe-nucleotide"
  modified_base 20..20: /mod_base="OTHER" /note="2'-fluoro-nucleotide"
  modified_base 21..21: /mod_base="OTHER" /note="2'-OMe-nucleotide"
  modified_base 22..22: /mod_base="OTHER" /note="2'-fluoro-nucleotide"
  modified_base 23..23: /mod_base="OTHER" /note="Inverted nucleotide"
ccaggugaacauacaaguggcat

SEQ ID NO: 618 - DNA, 23 bp, Artificial Sequence
  Description of Artificial Sequence: Synthetic oligonucleotide
  Description of Combined DNA/RNA Molecule: Synthetic oligonucleotide
  N-term hydroxyl group
  C-term hydroxyl group
  modified_base 1..1: /mod_base="OTHER" /note="2'-OMe-nucleotide"
  modified_base 2..2: /mod_base="OTHER" /note="2'-OMe-nucleotide"
  modified_base 3..3: /mod_base="OTHER" /note="2'-OMe-nucleotide"
  modified_base 4..4: /mod_base="OTHER" /note="2'-fluoro-nucleotide"
  modified_base 5..5: /mod_base="OTHER" /note="2'-OMe-nucleotide"
  modified_base 6..6: /mod_base="OTHER" /note="2'-fluoro-nucleotide"
  modified_base 7..7: /mod_base="OTHER" /note="2'-OMe-nucleotide"
  modified_base 8..8: /mod_base="OTHER" /note="2'-fluoro-nucleotide"
  modified_base 9..9: /mod_base="OTHER" /note="2'-OMe-nucleotide"
  modified_base 10..10: /mod_base="OTHER" /note="2'-fluoro-nucleotide"
  modified_base 11..11: /mod_base="OTHER" /note="2'-OMe-nucleotide"
  modified_base 12..12: /mod_base="OTHER" /note="2'-fluoro-nucleotide"
  modified_base 13..13: /mod_base="OTHER" /note="2'-OMe-nucleotide"
  modified_base 14..14: /mod_base="OTHER" /note="2'-fluoro-nucleotide"
  modified_base 15..15: /mod_base="OTHER" /note="2'-OMe-nucleotide"
  modified_base 16..16: /mod_base="OTHER" /note="2'-fluoro-nucleotide"
  modified_base 17..17: /mod_base="OTHER" /note="2'-OMe-nucleotide"
  modified_base 18..18: /mod_base="OTHER" /note="2'-fluoro-nucleotide"
  modified_base 19..19: /mod_base="OTHER" /note="2'-OMe-nucleotide"
  modified_base 20..20: /mod_base="OTHER" /note="2'-fluoro-nucleotide"
  modified_base 21..21: /mod_base="OTHER" /note="2'-OMe-nucleotide"
  modified_base 22..22: /mod_base="OTHER" /note="2'-fluoro-nucleotide"
  modified_base 23..23: /mod_base="OTHER" /note="Inverted nucleotide"
ccaaaguggcauguaugccauct

SEQ ID NO: 619 - DNA, 23 bp, Artificial Sequence
  Description of Artificial Sequence: Synthetic oligonucleotide
  Description of Combined DNA/RNA Molecule: Synthetic oligonucleotide
  N-term hydroxyl group
  C-term hydroxyl group
  modified_base 1..1: /mod_base="OTHER" /note="2'-OMe-nucleotide"
  modified_base 2..2: /mod_base="OTHER" /note="2'-OMe-nucleotide"
  modified_base 3..3: /mod_base="OTHER" /note="2'-OMe-nucleotide"
  modified_base 4..4: /mod_base="OTHER" /note="2'-fluoro-nucleotide"
  modified_base 5..5: /mod_base="OTHER" /note="2'-OMe-nucleotide"
  modified_base 6..6: /mod_base="OTHER" /note="2'-fluoro-nucleotide"
  modified_base 7..7: /mod_base="OTHER" /note="2'-OMe-nucleotide"
  modified_base 8..8: /mod_base="OTHER" /note="2'-fluoro-nucleotide"
  modified_base 9..9: /mod_base="OTHER" /note="2'-OMe-nucleotide"
  modified_base 10..10: /mod_base="OTHER" /note="2'-fluoro-nucleotide"
  modified_base 11..11: /mod_base="OTHER" /note="2'-OMe-nucleotide"
  modified_base 12..12: /mod_base="OTHER" /note="2'-fluoro-nucleotide"
  modified_base 13..13: /mod_base="OTHER" /note="2'-OMe-nucleotide"
  modified_base 14..14: /mod_base="OTHER" /note="2'-fluoro-nucleotide"
  modified_base 15..15: /mod_base="OTHER" /note="2'-OMe-nucleotide"
  modified_base 16..16: /mod_base="OTHER" /note="2'-fluoro-nucleotide"
  modified_base 17..17: /mod_base="OTHER" /note="2'-OMe-nucleotide"
  modified_base 18..18: /mod_base="OTHER" /note="2'-fluoro-nucleotide"
  modified_base 19..19: /mod_base="OTHER" /note="2'-OMe-nucleotide"
  modified_base 20..20: /mod_base="OTHER" /note="2'-fluoro-nucleotide"
  modified_base 21..21: /mod_base="OTHER" /note="2'-OMe-nucleotide"
  modified_base 22..22: /mod_base="OTHER" /note="2'-fluoro-nucleotide"
  modified_base 23..23: /mod_base="OTHER" /note="Inverted nucleotide"
ccaaguggcauguaugccaucat

SEQ ID NO: 620 - DNA, 23 bp, Artificial Sequence
  Description of Artificial Sequence: Synthetic oligonucleotide
  Description of Combined DNA/RNA Molecule: Synthetic oligonucleotide
  N-term hydroxyl group
  C-term hydroxyl group
  modified_base 1..1: /mod_base="OTHER" /note="2'-OMe-nucleotide"
  modified_base 2..2: /mod_base="OTHER" /note="2'-OMe-nucleotide"
  modified_base 3..3: /mod_base="OTHER" /note="2'-OMe-nucleotide"
  modified_base 4..4: /mod_base="OTHER" /note="2'-fluoro-nucleotide"
  modified_base 5..5: /mod_base="OTHER" /note="2'-OMe-nucleotide"
  modified_base 6..6: /mod_base="OTHER" /note="2'-fluoro-nucleotide"
  modified_base 7..7: /mod_base="OTHER" /note="2'-OMe-nucleotide"
  modified_base 8..8: /mod_base="OTHER" /note="2'-fluoro-nucleotide"
  modified_base 9..9: /mod_base="OTHER" /note="2'-OMe-nucleotide"
  modified_base 10..10: /mod_base="OTHER" /note="2'-fluoro-nucleotide"
  modified_base 11..11: /mod_base="OTHER" /note="2'-OMe-nucleotide"
  modified_base 12..12: /mod_base="OTHER" /note="2'-fluoro-nucleotide"
  modified_base 13..13: /mod_base="OTHER" /note="2'-OMe-nucleotide"
  modified_base 14..14: /mod_base="OTHER" /note="2'-fluoro-nucleotide"
  modified_base 15..15: /mod_base="OTHER" /note="2'-OMe-nucleotide"
  modified_base 16..16: /mod_base="OTHER" /note="2'-fluoro-nucleotide"
  modified_base 17..17: /mod_base="OTHER" /note="2'-OMe-nucleotide"
  modified_base 18..18: /mod_base="OTHER" /note="2'-fluoro-nucleotide"
  modified_base 19..19: /mod_base="OTHER" /note="2'-OMe-nucleotide"
  modified_base 20..20: /mod_base="OTHER" /note="2'-fluoro-nucleotide"
  modified_base 21..21: /mod_base="OTHER" /note="2'-OMe-nucleotide"
  modified_base 22..22: /mod_base="OTHER" /note="2'-fluoro-nucleotide"
  modified_base 23..23: /mod_base="OTHER" /note="Inverted nucleotide"
ccaguggcauguaugccaucagt

SEQ ID NO: 621 - DNA, 23 bp, Artificial Sequence
  Description of Artificial Sequence: Synthetic oligonucleotide
  Description of Combined DNA/RNA Molecule: Synthetic oligonucleotide
  N-term hydroxyl group
  C-term hydroxyl group
  modified_base 1..1: /mod_base="OTHER" /note="2'-OMe-nucleotide"
  modified_base 2..2: /mod_base="OTHER" /note="2'-OMe-nucleotide"
  modified_base 3..3: /mod_base="OTHER" /note="2'-OMe-nucleotide"
  modified_base 4..4: /mod_base="OTHER" /note="2'-fluoro-nucleotide"
  modified_base 5..5: /mod_base="OTHER" /note="2'-OMe-nucleotide"
  modified_base 6..6: /mod_base="OTHER" /note="2'-fluoro-nucleotide"
  modified_base 7..7: /mod_base="OTHER" /note="2'-OMe-nucleotide"
  modified_base 8..8: /mod_base="OTHER" /note="2'-fluoro-nucleotide"
  modified_base 9..9: /mod_base="OTHER" /note="2'-OMe-nucleotide"
  modified_base 10..10: /mod_base="OTHER" /note="2'-fluoro-nucleotide"
  modified_base 11..11: /mod_base="OTHER" /note="2'-OMe-nucleotide"
  modified_base 12..12: /mod_base="OTHER" /note="2'-fluoro-nucleotide"
  modified_base 13..13: /mod_base="OTHER" /note="2'-OMe-nucleotide"
  modified_base 14..14: /mod_base="OTHER" /note="2'-fluoro-nucleotide"
  modified_base 15..15: /mod_base="OTHER" /note="2'-OMe-nucleotide"
  modified_base 16..16: /mod_base="OTHER" /note="2'-fluoro-nucleotide"
  modified_base 17..17: /mod_base="OTHER" /note="2'-OMe-nucleotide"
  modified_base 18..18: /mod_base="OTHER" /note="2'-fluoro-nucleotide"
  modified_base 19..19: /mod_base="OTHER" /note="2'-OMe-nucleotide"
  modified_base 20..20: /mod_base="OTHER" /note="2'-fluoro-nucleotide"
  modified_base 21..21: /mod_base="OTHER" /note="2'-OMe-nucleotide"
  modified_base 22..22: /mod_base="OTHER" /note="2'-fluoro-nucleotide"
  modified_base 23..23: /mod_base="OTHER" /note="Inverted nucleotide"
ccauggcauguaugccaucagat

SEQ ID NO: 622 - DNA, 23 bp, Artificial Sequence
  Description of Artificial Sequence: Synthetic oligonucleotide
  Description of Combined DNA/RNA Molecule: Synthetic oligonucleotide
  N-term hydroxyl group
  C-term hydroxyl group
  modified_base 1..1: /mod_base="OTHER" /note="2'-OMe-nucleotide"
  modified_base 2..2: /mod_base="OTHER" /note="2'-OMe-nucleotide"
  modified_base 3..3: /mod_base="OTHER" /note="2'-OMe-nucleotide"
  modified_base 4..4: /mod_base="OTHER" /note="2'-fluoro-nucleotide"
  modified_base 5..5: /mod_base="OTHER" /note="2'-OMe-nucleotide"
  modified_base 6..6: /mod_base="OTHER" /note="2'-fluoro-nucleotide"
  modified_base 7..7: /mod_base="OTHER" /note="2'-OMe-nucleotide"
  modified_base 8..8: /mod_base="OTHER" /note="2'-fluoro-nucleotide"
  modified_base 9..9: /mod_base="OTHER" /note="2'-OMe-nucleotide"
  modified_base 10..10: /mod_base="OTHER" /note="2'-fluoro-nucleotide"
  modified_base 11..11: /mod_base="OTHER" /note="2'-OMe-nucleotide"
  modified_base 12..12: /mod_base="OTHER" /note="2'-fluoro-nucleotide"
  modified_base 13..13: /mod_base="OTHER" /note="2'-OMe-nucleotide"
  modified_base 14..14: /mod_base="OTHER" /note="2'-fluoro-nucleotide"
  modified_base 15..15: /mod_base="OTHER" /note="2'-OMe-nucleotide"
  modified_base 16..16: /mod_base="OTHER" /note="2'-fluoro-nucleotide"
  modified_base 17..17: /mod_base="OTHER" /note="2'-OMe-nucleotide"
  modified_base 18..18: /mod_base="OTHER" /note="2'-fluoro-nucleotide"
  modified_base 19..19: /mod_base="OTHER" /note="2'-OMe-nucleotide"
  modified_base 20..20: /mod_base="OTHER" /note="2'-fluoro-nucleotide"
  modified_base 21..21: /mod_base="OTHER" /note="2'-OMe-nucleotide"
  modified_base 22..22: /mod_base="OTHER" /note="2'-fluoro-nucleotide"
  modified_base 23..23: /mod_base="OTHER" /note="Inverted nucleotide"
ccacuauacgcuacaucuaguut

SEQ ID NO: 623 - DNA, 23 bp, Artificial Sequence
  Description of Artificial Sequence: Synthetic oligonucleotide
  Description of Combined DNA/RNA Molecule: Synthetic oligonucleotide
  N-term hydroxyl group
  C-term hydroxyl group
  modified_base 1..1: /mod_base="OTHER" /note="2'-OMe-nucleotide"
  modified_base 2..2: /mod_base="OTHER" /note="2'-OMe-nucleotide"
  modified_base 3..3: /mod_base="OTHER" /note="2'-OMe-nucleotide"
  modified_base 4..4: /mod_base="OTHER" /note="2'-fluoro-nucleotide"
  modified_base 5..5: /mod_base="OTHER" /note="2'-OMe-nucleotide"
  modified_base 6..6: /mod_base="OTHER" /note="2'-fluoro-nucleotide"
  modified_base 7..7: /mod_base="OTHER" /note="2'-OMe-nucleotide"
  modified_base 8..8: /mod_base="OTHER" /note="2'-fluoro-nucleotide"
  modified_base 9..9: /mod_base="OTHER" /note="2'-OMe-nucleotide"
  modified_base 10..10: /mod_base="OTHER" /note="2'-fluoro-nucleotide"
  modified_base 11..11: /mod_base="OTHER" /note="2'-OMe-nucleotide"
  modified_base 12..12: /mod_base="OTHER" /note="2'-fluoro-nucleotide"
  modified_base 13..13: /mod_base="OTHER" /note="2'-OMe-nucleotide"
  modified_base 14..14: /mod_base="OTHER" /note="2'-fluoro-nucleotide"
  modified_base 15..15: /mod_base="OTHER" /note="2'-OMe-nucleotide"
  modified_base 16..16: /mod_base="OTHER" /note="2'-fluoro-nucleotide"
  modified_base 17..17: /mod_base="OTHER" /note="2'-OMe-nucleotide"
  modified_base 18..18: /mod_base="OTHER" /note="2'-fluoro-nucleotide"
  modified_base 19..19: /mod_base="OTHER" /note="2'-OMe-nucleotide"
  modified_base 20..20: /mod_base="OTHER" /note="2'-fluoro-nucleotide"
  modified_base 21..21: /mod_base="OTHER" /note="2'-OMe-nucleotide"
  modified_base 22..22: /mod_base="OTHER" /note="2'-fluoro-nucleotide"
  modified_base 23..23: /mod_base="OTHER" /note="Inverted nucleotide"
ccacaaaaggacacuucaacugt

SEQ ID NO: 624 - DNA, 23 bp, Artificial Sequence
  Description of Artificial Sequence: Synthetic oligonucleotide
  Description of Combined DNA/RNA Molecule: Synthetic oligonucleotide
  N-term hydroxyl group
  C-term hydroxyl group
  modified_base 1..1: /mod_base="OTHER" /note="2'-OMe-nucleotide"
  modified_base 2..2: /mod_base="OTHER" /note="2'-OMe-nucleotide"
  modified_base 3..3: /mod_base="OTHER" /note="2'-OMe-nucleotide"
  modified_base 4..4: /mod_base="OTHER" /note="2'-fluoro-nucleotide"
  modified_base 5..5: /mod_base="OTHER" /note="2'-OMe-nucleotide"
  modified_base 6..6: /mod_base="OTHER" /note="2'-fluoro-nucleotide"
  modified_base 7..7: /mod_base="OTHER" /note="2'-OMe-nucleotide"
  modified_base 8..8: /mod_base="OTHER" /note="2'-fluoro-nucleotide"
  modified_base 9..9: /mod_base="OTHER" /note="2'-OMe-nucleotide"
  modified_base 10..10: /mod_base="OTHER" /note="2'-fluoro-nucleotide"
  modified_base 11..11: /mod_base="OTHER" /note="2'-OMe-nucleotide"
  modified_base 12..12: /mod_base="OTHER" /note="2'-fluoro-nucleotide"
  modified_base 13..13: /mod_base="OTHER" /note="2'-OMe-nucleotide"
  modified_base 14..14: /mod_base="OTHER" /note="2'-fluoro-nucleotide"
  modified_base 15..15: /mod_base="OTHER" /note="2'-OMe-nucleotide"
  modified_base 16..16: /mod_base="OTHER" /note="2'-fluoro-nucleotide"
  modified_base 17..17: /mod_base="OTHER" /note="2'-OMe-nucleotide"
  modified_base 18..18: /mod_base="OTHER" /note="2'-fluoro-nucleotide"
  modified_base 19..19: /mod_base="OTHER" /note="2'-OMe-nucleotide"
  modified_base 20..20: /mod_base="OTHER" /note="2'-fluoro-nucleotide"
  modified_base 21..21: /mod_base="OTHER" /note="2'-OMe-nucleotide"
  modified_base 22..22: /mod_base="OTHER" /note="2'-fluoro-nucleotide"
  modified_base 23..23: /mod_base="OTHER" /note="Inverted nucleotide"
ccaaaaaggacacuucaacugut

SEQ ID NO: 625 - DNA, 23 bp, Artificial Sequence
  Description of Artificial Sequence: Synthetic oligonucleotide
  Description of Combined DNA/RNA Molecule: Synthetic oligonucleotide
  N-term hydroxyl group
  C-term hydroxyl group
  modified_base 1..1: /mod_base="OTHER" /note="2'-OMe-nucleotide"
  modified_base 2..2: /mod_base="OTHER" /note="2'-OMe-nucleotide"
  modified_base 3..3: /mod_base="OTHER" /note="2'-OMe-nucleotide"
  modified_base 4..4: /mod_base="OTHER" /note="2'-fluoro-nucleotide"
  modified_base 5..5: /mod_base="OTHER" /note="2'-OMe-nucleotide"
  modified_base 6..6: /mod_base="OTHER" /note="2'-fluoro-nucleotide"
  modified_base 7..7: /mod_base="OTHER" /note="2'-OMe-nucleotide"
  modified_base 8..8: /mod_base="OTHER" /note="2'-fluoro-nucleotide"
  modified_base 9..9: /mod_base="OTHER" /note="2'-OMe-nucleotide"
  modified_base 10..10: /mod_base="OTHER" /note="2'-fluoro-nucleotide"
  modified_base 11..11: /mod_base="OTHER" /note="2'-OMe-nucleotide"
  modified_base 12..12: /mod_base="OTHER" /note="2'-fluoro-nucleotide"
  modified_base 13..13: /mod_base="OTHER" /note="2'-OMe-nucleotide"
  modified_base 14..14: /mod_base="OTHER" /note="2'-fluoro-nucleotide"
  modified_base 15..15: /mod_base="OTHER" /note="2'-OMe-nucleotide"
  modified_base 16..16: /mod_base="OTHER" /note="2'-fluoro-nucleotide"
  modified_base 17..17: /mod_base="OTHER" /note="2'-OMe-nucleotide"
  modified_base 18..18: /mod_base="OTHER" /note="2'-fluoro-nucleotide"
  modified_base 19..19: /mod_base="OTHER" /note="2'-OMe-nucleotide"
  modified_base 20..20: /mod_base="OTHER" /note="2'-fluoro-nucleotide"
  modified_base 21..21: /mod_base="OTHER" /note="2'-OMe-nucleotide"
  modified_base 22..22: /mod_base="OTHER" /note="2'-fluoro-nucleotide"
  modified_base 23..23: /mod_base="OTHER" /note="Inverted nucleotide"
ccaaaaggacacuucaacuguct

SEQ ID NO: 626 - DNA, 23 bp, Artificial Sequence
  Description of Artificial Sequence: Synthetic oligonucleotide
  Description of Combined DNA/RNA Molecule: Synthetic oligonucleotide
  N-term hydroxyl group
  C-term hydroxyl group
  modified_base 1..1: /mod_base="OTHER" /note="2'-OMe-nucleotide"
  modified_base 2..2: /mod_base="OTHER" /note="2'-OMe-nucleotide"
  modified_base 3..3: /mod_base="OTHER" /note="2'-OMe-nucleotide"
  modified_base 4..4: /mod_base="OTHER" /note="2'-fluoro-nucleotide"
  modified_base 5..5: /mod_base="OTHER" /note="2'-OMe-nucleotide"
  modified_base 6..6: /mod_base="OTHER" /note="2'-fluoro-nucleotide"
  modified_base 7..7: /mod_base="OTHER" /note="2'-OMe-nucleotide"
  modified_base 8..8: /mod_base="OTHER" /note="2'-fluoro-nucleotide"
  modified_base 9..9: /mod_base="OTHER" /note="2'-OMe-nucleotide"
  modified_base 10..10: /mod_base="OTHER" /note="2'-fluoro-nucleotide"
  modified_base 11..11: /mod_base="OTHER" /note="2'-OMe-nucleotide"
  modified_base 12..12: /mod_base="OTHER" /note="2'-fluoro-nucleotide"
  modified_base 13..13: /mod_base="OTHER" /note="2'-OMe-nucleotide"
  modified_base 14..14: /mod_base="OTHER" /note="2'-fluoro-nucleotide"
  modified_base 15..15: /mod_base="OTHER" /note="2'-OMe-nucleotide"
  modified_base 16..16: /mod_base="OTHER" /note="2'-fluoro-nucleotide"
  modified_base 17..17: /mod_base="OTHER" /note="2'-OMe-nucleotide"
  modified_base 18..18: /mod_base="OTHER" /note="2'-fluoro-nucleotide"
  modified_base 19..19: /mod_base="OTHER" /note="2'-OMe-nucleotide"
  modified_base 20..20: /mod_base="OTHER" /note="2'-fluoro-nucleotide"
  modified_base 21..21: /mod_base="OTHER" /note="2'-OMe-nucleotide"
  modified_base 22..22: /mod_base="OTHER" /note="2'-fluoro-nucleotide"
  modified_base 23..23: /mod_base="OTHER" /note="Inverted nucleotide"
ccaaaggacacuucaacugucct

SEQ ID NO: 627 - DNA, 23 bp, Artificial Sequence
  Description of Artificial Sequence: Synthetic oligonucleotide
  Description of Combined DNA/RNA Molecule: Synthetic oligonucleotide
  N-term hydroxyl group
  C-term hydroxyl group
  modified_base 1..1: /mod_base="OTHER" /note="2'-OMe-nucleotide"
  modified_base 2..2: /mod_base="OTHER" /note="2'-OMe-nucleotide"
  modified_base 3..3: /mod_base="OTHER" /note="2'-OMe-nucleotide"
  modified_base 4..4: /mod_base="OTHER" /note="2'-fluoro-nucleotide"
  modified_base 5..5: /mod_base="OTHER" /note="2'-OMe-nucleotide"
  modified_base 6..6: /mod_base="OTHER" /note="2'-fluoro-nucleotide"
  modified_base 7..7: /mod_base="OTHER" /note="2'-OMe-nucleotide"
  modified_base 8..8: /mod_base="OTHER" /note="2'-fluoro-nucleotide"
  modified_base 9..9: /mod_base="OTHER" /note="2'-OMe-nucleotide"
  modified_base 10..10: /mod_base="OTHER" /note="2'-fluoro-nucleotide"
  modified_base 11..11: /mod_base="OTHER" /note="2'-OMe-nucleotide"
  modified_base 12..12: /mod_base="OTHER" /note="2'-fluoro-nucleotide"
  modified_base 13..13: /mod_base="OTHER" /note="2'-OMe-nucleotide"
  modified_base 14..14: /mod_base="OTHER" /note="2'-fluoro-nucleotide"
  modified_base 15..15: /mod_base="OTHER" /note="2'-OMe-nucleotide"
  modified_base 16..16: /mod_base="OTHER" /note="2'-fluoro-nucleotide"
  modified_base 17..17: /mod_base="OTHER" /note="2'-OMe-nucleotide"
  modified_base 18..18: /mod_base="OTHER" /note="2'-fluoro-nucleotide"
  modified_base 19..19: /mod_base="OTHER" /note="2'-OMe-nucleotide"
  modified_base 20..20: /mod_base="OTHER" /note="2'-fluoro-nucleotide"
  modified_base 21..21: /mod_base="OTHER" /note="2'-OMe-nucleotide"
  modified_base 22..22: /mod_base="OTHER" /note="2'-fluoro-nucleotide"
  modified_base 23..23: /mod_base="OTHER" /note="Inverted nucleotide"
ccaaggacacuucaacuguccat

SEQ ID NO: 628 - DNA, 23 bp, Artificial Sequence
  Description of Artificial Sequence: Synthetic oligonucleotide
  Description of Combined DNA/RNA Molecule: Synthetic oligonucleotide
  N-term hydroxyl group
  C-term hydroxyl group
  modified_base 1..1: /mod_base="OTHER" /note="2'-OMe-nucleotide"
  modified_base 2..2: /mod_base="OTHER" /note="2'-OMe-nucleotide"
  modified_base 3..3: /mod_base="OTHER" /note="2'-OMe-nucleotide"
  modified_base 4..4: /mod_base="OTHER" /note="2'-fluoro-nucleotide"
  modified_base 5..5: /mod_base="OTHER" /note="2'-OMe-nucleotide"
  modified_base 6..6: /mod_base="OTHER" /note="2'-fluoro-nucleotide"
  modified_base 7..7: /mod_base="OTHER" /note="2'-OMe-nucleotide"
  modified_base 8..8: /mod_base="OTHER" /note="2'-fluoro-nucleotide"
  modified_base 9..9: /mod_base="OTHER" /note="2'-OMe-nucleotide"
  modified_base 10..10: /mod_base="OTHER" /note="2'-fluoro-nucleotide"
  modified_base 11..11: /mod_base="OTHER" /note="2'-OMe-nucleotide"
  modified_base 12..12: /mod_base="OTHER" /note="2'-fluoro-nucleotide"
  modified_base 13..13: /mod_base="OTHER" /note="2'-OMe-nucleotide"
  modified_base 14..14: /mod_base="OTHER" /note="2'-fluoro-nucleotide"
  modified_base 15..15: /mod_base="OTHER" /note="2'-OMe-nucleotide"
  modified_base 16..16: /mod_base="OTHER" /note="2'-fluoro-nucleotide"
  modified_base 17..17: /mod_base="OTHER" /note="2'-OMe-nucleotide"
  modified_base 18..18: /mod_base="OTHER" /note="2'-fluoro-nucleotide"
  modified_base 19..19: /mod_base="OTHER" /note="2'-OMe-nucleotide"
  modified_base 20..20: /mod_base="OTHER" /note="2'-fluoro-nucleotide"
  modified_base 21..21: /mod_base="OTHER" /note="2'-OMe-nucleotide"
  modified_base 22..22: /mod_base="OTHER" /note="2'-fluoro-nucleotide"
  modified_base 23..23: /mod_base="OTHER" /note="Inverted nucleotide"
ccaggacacuucaacuguccagt

SEQ ID NO: 629 - DNA, 23 bp, Artificial Sequence
  Description of Artificial Sequence: Synthetic oligonucleotide
  Description of Combined DNA/RNA Molecule: Synthetic oligonucleotide
  N-term hydroxyl group
  C-term hydroxyl group
  modified_base 1..1: /mod_base="OTHER" /note="2'-OMe-nucleotide"
  modified_base 2..2: /mod_base="OTHER" /note="2'-OMe-nucleotide"
  modified_base 3..3: /mod_base="OTHER" /note="2'-OMe-nucleotide"
  modified_base 4..4: /mod_base="OTHER" /note="2'-fluoro-nucleotide"
  modified_base 5..5: /mod_base="OTHER" /note="2'-OMe-nucleotide"
  modified_base 6..6: /mod_base="OTHER" /note="2'-fluoro-nucleotide"
  modified_base 7..7: /mod_base="OTHER" /note="2'-OMe-nucleotide"
  modified_base 8..8: /mod_base="OTHER" /note="2'-fluoro-nucleotide"
  modified_base 9..9: /mod_base="OTHER" /note="2'-OMe-nucleotide"
  modified_base 10..10: /mod_base="OTHER" /note="2'-fluoro-nucleotide"
  modified_base 11..11: /mod_base="OTHER" /note="2'-OMe-nucleotide"
  modified_base 12..12: /mod_base="OTHER" /note="2'-fluoro-nucleotide"
  modified_base 13..13: /mod_base="OTHER" /note="2'-OMe-nucleotide"
  modified_base 14..14: /mod_base="OTHER" /note="2'-fluoro-nucleotide"
  modified_base 15..15: /mod_base="OTHER" /note="2'-OMe-nucleotide"
  modified_base 16..16: /mod_base="OTHER" /note="2'-fluoro-nucleotide"
  modified_base 17..17: /mod_base="OTHER" /note="2'-OMe-nucleotide"
  modified_base 18..18: /mod_base="OTHER" /note="2'-fluoro-nucleotide"
  modified_base 19..19: /mod_base="OTHER" /note="2'-OMe-nucleotide"
  modified_base 20..20: /mod_base="OTHER" /note="2'-fluoro-nucleotide"
  modified_base 21..21: /mod_base="OTHER" /note="2'-OMe-nucleotide"
  modified_base 22..22: /mod_base="OTHER" /note="2'-fluoro-nucleotide"
  modified_base 23..23: /mod_base="OTHER" /note="Inverted nucleotide"
ccaguccagaggguuauucaggt

SEQ ID NO: 630 - DNA, 23 bp, Artificial Sequence
  Description of Artificial Sequence: Synthetic oligonucleotide
  Description of Combined DNA/RNA Molecule: Synthetic oligonucleotide
  N-term hydroxyl group
  C-term hydroxyl group
  modified_base 1..1: /mod_base="OTHER" /note="2'-OMe-nucleotide"
  modified_base 2..2: /mod_base="OTHER" /note="2'-OMe-nucleotide"
  modified_base 3..3: /mod_base="OTHER" /note="2'-OMe-nucleotide"
  modified_base 4..4: /mod_base="OTHER" /note="2'-fluoro-nucleotide"
  modified_base 5..5: /mod_base="OTHER" /note="2'-OMe-nucleotide"
  modified_base 6..6: /mod_base="OTHER" /note="2'-fluoro-nucleotide"
  modified_base 7..7: /mod_base="OTHER" /note="2'-OMe-nucleotide"
  modified_base 8..8: /mod_base="OTHER" /note="2'-fluoro-nucleotide"
  modified_base 9..9: /mod_base="OTHER" /note="2'-OMe-nucleotide"
  modified_base 10..10: /mod_base="OTHER" /note="2'-fluoro-nucleotide"
  modified_base 11..11: /mod_base="OTHER" /note="2'-OMe-nucleotide"
  modified_base 12..12: /mod_base="OTHER" /note="2'-fluoro-nucleotide"
  modified_base 13..13: /mod_base="OTHER" /note="2'-OMe-nucleotide"
  modified_base 14..14: /mod_base="OTHER" /note="2'-fluoro-nucleotide"
  modified_base 15..15: /mod_base="OTHER" /note="2'-OMe-nucleotide"
  modified_base 16..16: /mod_base="OTHER" /note="2'-fluoro-nucleotide"
  modified_base 17..17: /mod_base="OTHER" /note="2'-OMe-nucleotide"
  modified_base 18..18: /mod_base="OTHER" /note="2'-fluoro-nucleotide"
  modified_base 19..19: /mod_base="OTHER" /note="2'-OMe-nucleotide"
  modified_base 20..20: /mod_base="OTHER" /note="2'-fluoro-nucleotide"
  modified_base 21..21: /mod_base="OTHER" /note="2'-OMe-nucleotide"
  modified_base 22..22: /mod_base="OTHER" /note="2'-fluoro-nucleotide"
  modified_base 23..23: /mod_base="OTHER" /note="Inverted nucleotide"
ccauccagaggguuauucaggat

SEQ ID NO: 631 - DNA, 23 bp, Artificial Sequence
  Description of Artificial Sequence: Synthetic oligonucleotide
  Description of Combined DNA/RNA Molecule: Synthetic oligonucleotide
  N-term hydroxyl group
  C-term hydroxyl group
  modified_base 1..1: /mod_base="OTHER" /note="2'-OMe-nucleotide"
  modified_base 2..2: /mod_base="OTHER" /note="2'-OMe-nucleotide"
  modified_base 3..3: /mod_base="OTHER" /note="2'-OMe-nucleotide"
  modified_base 4..4: /mod_base="OTHER" /note="2'-fluoro-nucleotide"
  modified_base 5..5: /mod_base="OTHER" /note="2'-OMe-nucleotide"
  modified_base 6..6: /mod_base="OTHER" /note="2'-fluoro-nucleotide"
  modified_base 7..7: /mod_base="OTHER" /note="2'-OMe-nucleotide"
  modified_base 8..8: /mod_base="OTHER" /note="2'-fluoro-nucleotide"
  modified_base 9..9: /mod_base="OTHER" /note="2'-OMe-nucleotide"
  modified_base 10..10: /mod_base="OTHER" /note="2'-fluoro-nucleotide"
  modified_base 11..11: /mod_base="OTHER" /note="2'-OMe-nucleotide"
  modified_base 12..12: /mod_base="OTHER" /note="2'-fluoro-nucleotide"
  modified_base 13..13: /mod_base="OTHER" /note="2'-OMe-nucleotide"
  modified_base 14..14: /mod_base="OTHER" /note="2'-fluoro-nucleotide"
  modified_base 15..15: /mod_base="OTHER" /note="2'-OMe-nucleotide"
  modified_base 16..16: /mod_base="OTHER" /note="2'-fluoro-nucleotide"
  modified_base 17..17: /mod_base="OTHER" /note="2'-OMe-nucleotide"
  modified_base 18..18: /mod_base="OTHER" /note="2'-fluoro-nucleotide"
  modified_base 19..19: /mod_base="OTHER" /note="2'-OMe-nucleotide"
  modified_base 20..20: /mod_base="OTHER" /note="2'-fluoro-nucleotide"
  modified_base 21..21: /mod_base="OTHER" /note="2'-OMe-nucleotide"
  modified_base 22..22: /mod_base="OTHER" /note="2'-fluoro-nucleotide"
  modified_base 23..23: /mod_base="OTHER" /note="Inverted nucleotide"
ccaccagaggguuauucaggagt

SEQ ID NO: 632 - DNA, 23 bp, Artificial Sequence
  Description of Artificial Sequence: Synthetic oligonucleotide
  Description of Combined DNA/RNA Molecule: Synthetic oligonucleotide
  N-term hydroxyl group
  C-term hydroxyl group
  modified_base 1..1: /mod_base="OTHER" /note="2'-OMe-nucleotide"
  modified_base 2..2: /mod_base="OTHER" /note="2'-OMe-nucleotide"
  modified_base 3..3: /mod_base="OTHER" /note="2'-OMe-nucleotide"
  modified_base 4..4: /mod_base="OTHER" /note="2'-fluoro-nucleotide"
  modified_base 5..5: /mod_base="OTHER" /note="2'-OMe-nucleotide"
  modified_base 6..6: /mod_base="OTHER" /note="2'-fluoro-nucleotide"
  modified_base 7..7: /mod_base="OTHER" /note="2'-OMe-nucleotide"
  modified_base 8..8: /mod_base="OTHER" /note="2'-fluoro-nucleotide"
  modified_base 9..9: /mod_base="OTHER" /note="2'-OMe-nucleotide"
  modified_base 10..10: /mod_base="OTHER" /note="2'-fluoro-nucleotide"
  modified_base 11..11: /mod_base="OTHER" /note="2'-OMe-nucleotide"
  modified_base 12..12: /mod_base="OTHER" /note="2'-fluoro-nucleotide"
  modified_base 13..13: /mod_base="OTHER" /note="2'-OMe-nucleotide"
  modified_base 14..14: /mod_base="OTHER" /note="2'-fluoro-nucleotide"
  modified_base 15..15: /mod_base="OTHER" /note="2'-OMe-nucleotide"
  modified_base 16..16: /mod_base="OTHER" /note="2'-fluoro-nucleotide"
  modified_base 17..17: /mod_base="OTHER" /note="2'-OMe-nucleotide"
  modified_base 18..18: /mod_base="OTHER" /note="2'-fluoro-nucleotide"
  modified_base 19..19: /mod_base="OTHER" /note="2'-OMe-nucleotide"
  modified_base 20..20: /mod_base="OTHER" /note="2'-fluoro-nucleotide"
  modified_base 21..21: /mod_base="OTHER" /note="2'-OMe-nucleotide"
  modified_base 22..22: /mod_base="OTHER" /note="2'-fluoro-nucleotide"
  modified_base 23..23: /mod_base="OTHER" /note="Inverted nucleotide"
ccacagaggguuauucaggaggt

SEQ ID NO: 633 - DNA, 23 bp, Artificial Sequence
  Description of Artificial Sequence: Synthetic oligonucleotide
  Description of Combined DNA/RNA Molecule: Synthetic oligonucleotide
  N-term hydroxyl group
  C-term hydroxyl group
  modified_base 1..1: /mod_base="OTHER" /note="2'-OMe-nucleotide"
  modified_base 2..2: /mod_base="OTHER" /note="2'-OMe-nucleotide"
  modified_base 3..3: /mod_base="OTHER" /note="2'-OMe-nucleotide"
  modified_base 4..4: /mod_base="OTHER" /note="2'-fluoro-nucleotide"
  modified_base 5..5: /mod_base="OTHER" /note="2'-OMe-nucleotide"
  modified_base 6..6: /mod_base="OTHER" /note="2'-fluoro-nucleotide"
  modified_base 7..7: /mod_base="OTHER" /note="2'-OMe-nucleotide"
  modified_base 8..8: /mod_base="OTHER" /note="2'-fluoro-nucleotide"
  modified_base 9..9: /mod_base="OTHER" /note="2'-OMe-nucleotide"
  modified_base 10..10: /mod_base="OTHER" /note="2'-fluoro-nucleotide"
  modified_base 11..11: /mod_base="OTHER" /note="2'-OMe-nucleotide"
  modified_base 12..12: /mod_base="OTHER" /note="2'-fluoro-nucleotide"
  modified_base 13..13: /mod_base="OTHER" /note="2'-OMe-nucleotide"
  modified_base 14..14: /mod_base="OTHER" /note="2'-fluoro-nucleotide"
  modified_base 15..15: /mod_base="OTHER" /note="2'-OMe-nucleotide"
  modified_base 16..16: /mod_base="OTHER" /note="2'-fluoro-nucleotide"
  modified_base 17..17: /mod_base="OTHER" /note="2'-OMe-nucleotide"
  modified_base 18..18: /mod_base="OTHER" /note="2'-fluoro-nucleotide"
  modified_base 19..19: /mod_base="OTHER" /note="2'-OMe-nucleotide"
  modified_base 20..20: /mod_base="OTHER" /note="2'-fluoro-nucleotide"
  modified_base 21..21: /mod_base="OTHER" /note="2'-OMe-nucleotide"
  modified_base 22..22: /mod_base="OTHER" /note="2'-fluoro-nucleotide"
  modified_base 23..23: /mod_base="OTHER" /note="Inverted nucleotide"
ccaagaggguuauucaggaggct

SEQ ID NO: 634 - DNA, 23 bp, Artificial Sequence
  Description of Artificial Sequence: Synthetic oligonucleotide
  Description of Combined DNA/RNA Molecule: Synthetic oligonucleotide
  N-term hydroxyl group
  C-term hydroxyl group
  modified_base 1..1: /mod_base="OTHER" /note="2'-OMe-nucleotide"
  modified_base 2..2: /mod_base="OTHER" /note="2'-OMe-nucleotide"
  modified_base 3..3: /mod_base="OTHER" /note="2'-OMe-nucleotide"
  modified_base 4..4: /mod_base="OTHER" /note="2'-fluoro-nucleotide"
  modified_base 5..5: /mod_base="OTHER" /note="2'-OMe-nucleotide"
  modified_base 6..6: /mod_base="OTHER" /note="2'-fluoro-nucleotide"
  modified_base 7..7: /mod_base="OTHER" /note="2'-OMe-nucleotide"
  modified_base 8..8: /mod_base="OTHER" /note="2'-fluoro-nucleotide"
  modified_base 9..9: /mod_base="OTHER" /note="2'-OMe-nucleotide"
  modified_base 10..10: /mod_base="OTHER" /note="2'-fluoro-nucleotide"
  modified_base 11..11: /mod_base="OTHER" /note="2'-OMe-nucleotide"
  modified_base 12..12: /mod_base="OTHER" /note="2'-fluoro-nucleotide"
  modified_base 13..13: /mod_base="OTHER" /note="2'-OMe-nucleotide"
  modified_base 14..14: /mod_base="OTHER" /note="2'-fluoro-nucleotide"
  modified_base 15..15: /mod_base="OTHER" /note="2'-OMe-nucleotide"
  modified_base 16..16: /mod_base="OTHER" /note="2'-fluoro-nucleotide"
  modified_base 17..17: /mod_base="OTHER" /note="2'-OMe-nucleotide"
  modified_base 18..18: /mod_base="OTHER" /note="2'-fluoro-nucleotide"
  modified_base 19..19: /mod_base="OTHER" /note="2'-OMe-nucleotide"
  modified_base 20..20: /mod_base="OTHER" /note="2'-fluoro-nucleotide"
  modified_base 21..21: /mod_base="OTHER" /note="2'-OMe-nucleotide"
  modified_base 22..22: /mod_base="OTHER" /note="2'-fluoro-nucleotide"
  modified_base 23..23: /mod_base="OTHER" /note="Inverted nucleotide"
ccagaggguuauucaggaggcut

SEQ ID NO: 635 - DNA, 23 bp, Artificial Sequence
  Description of Artificial Sequence: Synthetic oligonucleotide
  Description of Combined DNA/RNA Molecule: Synthetic oligonucleotide
  N-term hydroxyl group
  C-term hydroxyl group
  modified_base 1..1: /mod_base="OTHER" /note="2'-OMe-nucleotide"
  modified_base 2..2: /mod_base="OTHER" /note="2'-OMe-nucleotide"
  modified_base 3..3: /mod_base="OTHER" /note="2'-OMe-nucleotide"
  modified_base 4..4: /mod_base="OTHER" /note="2'-fluoro-nucleotide"
  modified_base 5..5: /mod_base="OTHER" /note="2'-OMe-nucleotide"
  modified_base 6..6: /mod_base="OTHER" /note="2'-fluoro-nucleotide"
  modified_base 7..7: /mod_base="OTHER" /note="2'-OMe-nucleotide"
  modified_base 8..8: /mod_base="OTHER" /note="2'-fluoro-nucleotide"
  modified_base 9..9: /mod_base="OTHER" /note="2'-OMe-nucleotide"
  modified_base 10..10: /mod_base="OTHER" /note="2'-fluoro-nucleotide"
  modified_base 11..11: /mod_base="OTHER" /note="2'-OMe-nucleotide"
  modified_base 12..12: /mod_base="OTHER" /note="2'-fluoro-nucleotide"
  modified_base 13..13: /mod_base="OTHER" /note="2'-OMe-nucleotide"
  modified_base 14..14: /mod_base="OTHER" /note="2'-fluoro-nucleotide"
  modified_base 15..15: /mod_base="OTHER" /note="2'-OMe-nucleotide"
  modified_base 16..16: /mod_base="OTHER" /note="2'-fluoro-nucleotide"
  modified_base 17..17: /mod_base="OTHER" /note="2'-OMe-nucleotide"
  modified_base 18..18: /mod_base="OTHER" /note="2'-fluoro-nucleotide"
  modified_base 19..19: /mod_base="OTHER" /note="2'-OMe-nucleotide"
  modified_base 20..20: /mod_base="OTHER" /note="2'-fluoro-nucleotide"
  modified_base 21..21: /mod_base="OTHER" /note="2'-OMe-nucleotide"
  modified_base 22..22: /mod_base="OTHER" /note="2'-fluoro-nucleotide"
  modified_base 23..23: /mod_base="OTHER" /note="Inverted nucleotide"
ccaaggguuauucaggaggcugt

SEQ ID NO: 636 - DNA, 23 bp, Artificial Sequence
  Description of Artificial Sequence: Synthetic oligonucleotide
  Description of Combined DNA/RNA Molecule: Synthetic oligonucleotide
  N-term hydroxyl group
  C-term hydroxyl group
  modified_base 1..1: /mod_base="OTHER" /note="2'-OMe-nucleotide"
  modified_base 2..2: /mod_base="OTHER" /note="2'-OMe-nucleotide"
  modified_base 3..3: /mod_base="OTHER" /note="2'-OMe-nucleotide"
  modified_base 4..4: /mod_base="OTHER" /note="2'-fluoro-nucleotide"
  modified_base 5..5: /mod_base="OTHER" /note="2'-OMe-nucleotide"
  modified_base 6..6: /mod_base="OTHER" /note="2'-fluoro-nucleotide"
  modified_base 7..7: /mod_base="OTHER" /note="2'-OMe-nucleotide"
  modified_base 8..8: /mod_base="OTHER" /note="2'-fluoro-nucleotide"
  modified_base 9..9: /mod_base="OTHER" /note="2'-OMe-nucleotide"
  modified_base 10..10: /mod_base="OTHER" /note="2'-fluoro-nucleotide"
  modified_base 11..11: /mod_base="OTHER" /note="2'-OMe-nucleotide"
  modified_base 12..12: /mod_base="OTHER" /note="2'-fluoro-nucleotide"
  modified_base 13..13: /mod_base="OTHER" /note="2'-OMe-nucleotide"
  modified_base 14..14: /mod_base="OTHER" /note="2'-fluoro-nucleotide"
  modified_base 15..15: /mod_base="OTHER" /note="2'-OMe-nucleotide"
  modified_base 16..16: /mod_base="OTHER" /note="2'-fluoro-nucleotide"
  modified_base 17..17: /mod_base="OTHER" /note="2'-OMe-nucleotide"
  modified_base 18..18: /mod_base="OTHER" /note="2'-fluoro-nucleotide"
  modified_base 19..19: /mod_base="OTHER" /note="2'-OMe-nucleotide"
  modified_base 20..20: /mod_base="OTHER" /note="2'-fluoro-nucleotide"
  modified_base 21..21: /mod_base="OTHER" /note="2'-OMe-nucleotide"
  modified_base 22..22: /mod_base="OTHER" /note="2'-fluoro-nucleotide"
  modified_base 23..23: /mod_base="OTHER" /note="Inverted nucleotide"
ccagguuauucaggaggcuggut

SEQ ID NO: 637 - DNA, 23 bp, Artificial Sequence
  Description of Artificial Sequence: Synthetic oligonucleotide
  Description of Combined DNA/RNA Molecule: Synthetic oligonucleotide
  N-term hydroxyl group
  C-term hydroxyl group
  modified_base 1..1: /mod_base="OTHER" /note="2'-OMe-nucleotide"
  modified_base 2..2: /mod_base="OTHER" /note="2'-OMe-nucleotide"
  modified_base 3..3: /mod_base="OTHER" /note="2'-OMe-nucleotide"
  modified_base 4..4: /mod_base="OTHER" /note="2'-fluoro-nucleotide"
  modified_base 5..5: /mod_base="OTHER" /note="2'-OMe-nucleotide"
  modified_base 6..6: /mod_base="OTHER" /note="2'-fluoro-nucleotide"
  modified_base 7..7: /mod_base="OTHER" /note="2'-OMe-nucleotide"
  modified_base 8..8: /mod_base="OTHER" /note="2'-fluoro-nucleotide"
  modified_base 9..9: /mod_base="OTHER" /note="2'-OMe-nucleotide"
  modified_base 10..10: /mod_base="OTHER" /note="2'-fluoro-nucleotide"
  modified_base 11..11: /mod_base="OTHER" /note="2'-OMe-nucleotide"
  modified_base 12..12: /mod_base="OTHER" /note="2'-fluoro-nucleotide"
  modified_base 13..13: /mod_base="OTHER" /note="2'-OMe-nucleotide"
  modified_base 14..14: /mod_base="OTHER" /note="2'-fluoro-nucleotide"
  modified_base 15..15: /mod_base="OTHER" /note="2'-OMe-nucleotide"
  modified_base 16..16: /mod_base="OTHER" /note="2'-fluoro-nucleotide"
  modified_base 17..17: /mod_base="OTHER" /note="2'-OMe-nucleotide"
  modified_base 18..18: /mod_base="OTHER" /note="2'-fluoro-nucleotide"
  modified_base 19..19: /mod_base="OTHER" /note="2'-OMe-nucleotide"
  modified_base 20..20: /mod_base="OTHER" /note="2'-fluoro-nucleotide"
  modified_base 21..21: /mod_base="OTHER" /note="2'-OMe-nucleotide"
  modified_base 22..22: /mod_base="OTHER" /note="2'-fluoro-nucleotide"
  modified_base 23..23: /mod_base="OTHER" /note="Inverted nucleotide"
ccaaagaggauuaucuuggaagt

SEQ ID NO: 638 - DNA, 23 bp, Artificial Sequence
  Description of Artificial Sequence: Synthetic oligonucleotide
  Description of Combined DNA/RNA Molecule: Synthetic oligonucleotide
  N-term hydroxyl group
  C-term hydroxyl group
  modified_base 1..1: /mod_base="OTHER" /note="2'-OMe-nucleotide"
  modified_base 2..2: /mod_base="OTHER" /note="2'-OMe-nucleotide"
  modified_base 3..3: /mod_base="OTHER" /note="2'-OMe-nucleotide"
  modified_base 4..4: /mod_base="OTHER" /note="2'-fluoro-nucleotide"
  modified_base 5..5: /mod_base="OTHER" /note="2'-OMe-nucleotide"
  modified_base 6..6: /mod_base="OTHER" /note="2'-fluoro-nucleotide"
  modified_base 7..7: /mod_base="OTHER" /note="2'-OMe-nucleotide"
  modified_base 8..8: /mod_base="OTHER" /note="2'-fluoro-nucleotide"
  modified_base 9..9: /mod_base="OTHER" /note="2'-OMe-nucleotide"
  modified_base 10..10: /mod_base="OTHER" /note="2'-fluoro-nucleotide"
  modified_base 11..11: /mod_base="OTHER" /note="2'-OMe-nucleotide"
  modified_base 12..12: /mod_base="OTHER" /note="2'-fluoro-nucleotide"
  modified_base 13..13: /mod_base="OTHER" /note="2'-OMe-nucleotide"
  modified_base 14..14: /mod_base="OTHER" /note="2'-fluoro-nucleotide"
  modified_base 15..15: /mod_base="OTHER" /note="2'-OMe-nucleotide"
  modified_base 16..16: /mod_base="OTHER" /note="2'-fluoro-nucleotide"
  modified_base 17..17: /mod_base="OTHER" /note="2'-OMe-nucleotide"
  modified_base 18..18: /mod_base="OTHER" /note="2'-fluoro-nucleotide"
  modified_base 19..19: /mod_base="OTHER" /note="2'-OMe-nucleotide"
  modified_base 20..20: /mod_base="OTHER" /note="2'-fluoro-nucleotide"
  modified_base 21..21: /mod_base="OTHER" /note="2'-OMe-nucleotide"
  modified_base 22..22: /mod_base="OTHER" /note="2'-fluoro-nucleotide"
  modified_base 23..23: /mod_base="OTHER" /note="Inverted nucleotide"
ccaagaggauuaucuuggaagut

SEQ ID NO: 639 - DNA, 23 bp, Artificial Sequence
  Description of Artificial Sequence: Synthetic oligonucleotide
  Description of Combined DNA/RNA Molecule: Synthetic oligonucleotide
  N-term hydroxyl group
  C-term hydroxyl group
  modified_base 1..1: /mod_base="OTHER" /note="2'-OMe-nucleotide"
  modified_base 2..2: /mod_base="OTHER" /note="2'-OMe-nucleotide"
  modified_base 3..3: /mod_base="OTHER" /note="2'-OMe-nucleotide"
  modified_base 4..4: /mod_base="OTHER" /note="2'-fluoro-nucleotide"
  modified_base 5..5: /mod_base="OTHER" /note="2'-OMe-nucleotide"
  modified_base 6..6: /mod_base="OTHER" /note="2'-fluoro-nucleotide"
  modified_base 7..7: /mod_base="OTHER" /note="2'-OMe-nucleotide"
  modified_base 8..8: /mod_base="OTHER" /note="2'-fluoro-nucleotide"
  modified_base 9..9: /mod_base="OTHER" /note="2'-OMe-nucleotide"
  modified_base 10..10: /mod_base="OTHER" /note="2'-fluoro-nucleotide"
  modified_base 11..11: /mod_base="OTHER" /note="2'-OMe-nucleotide"
  modified_base 12..12: /mod_base="OTHER" /note="2'-fluoro-nucleotide"
  modified_base 13..13: /mod_base="OTHER" /note="2'-OMe-nucleotide"
  modified_base 14..14: /mod_base="OTHER" /note="2'-fluoro-nucleotide"
  modified_base 15..15: /mod_base="OTHER" /note="2'-OMe-nucleotide"
  modified_base 16..16: /mod_base="OTHER" /note="2'-fluoro-nucleotide"
  modified_base 17..17: /mod_base="OTHER" /note="2'-OMe-nucleotide"
  modified_base 18..18: /mod_base="OTHER" /note="2'-fluoro-nucleotide"
  modified_base 19..19: /mod_base="OTHER" /note="2'-OMe-nucleotide"
  modified_base 20..20: /mod_base="OTHER" /note="2'-fluoro-nucleotide"
  modified_base 21..21: /mod_base="OTHER" /note="2'-OMe-nucleotide"
  modified_base 22..22: /mod_base="OTHER" /note="2'-fluoro-nucleotide"
  modified_base 23..23: /mod_base="OTHER" /note="Inverted nucleotide"
ccagaggauuaucuuggaaguct

SEQ ID NO: 640 - DNA, 25 bp, Artificial Sequence
  Description of Artificial Sequence: Synthetic oligonucleotide
  Description of Combined DNA/RNA Molecule: Synthetic oligonucleotide
  N-term hydroxyl group
  C-term hydroxyl group
  modified_base 1..1: /mod_base="OTHER" /note="2'-OMe-nucleotide"
  modified_base 2..2: /mod_base="OTHER" /note="2'-OMe-nucleotide"
  modified_base 3..3: /mod_base="OTHER" /note="2'-OMe-nucleotide"
  modified_base 4..4: /mod_base="OTHER" /note="2'-fluoro-nucleotide"
  modified_base 5..5: /mod_base="OTHER" /note="2'-OMe-nucleotide"
  modified_base 6..6: /mod_base="OTHER" /note="2'-fluoro-nucleotide"
  modified_base 7..7: /mod_base="OTHER" /note="2'-OMe-nucleotide"
  modified_base 8..8: /mod_base="OTHER" /note="2'-fluoro-nucleotide"
  modified_base 9..9: /mod_base="OTHER" /note="2'-OMe-nucleotide"
  modified_base 10..10: /mod_base="OTHER" /note="2'-fluoro-nucleotide"
  modified_base 11..11: /mod_base="OTHER" /note="2'-OMe-nucleotide"
  modified_base 12..12: /mod_base="OTHER" /note="2'-fluoro-nucleotide"
  modified_base 13..13: /mod_base="OTHER" /note="2'-OMe-nucleotide"
  modified_base 14..14: /mod_base="OTHER" /note="2'-fluoro-nucleotide"
  modified_base 15..15: /mod_base="OTHER" /note="2'-OMe-nucleotide"
  modified_base 16..16: /mod_base="OTHER" /note="2'-fluoro-nucleotide"
  modified_base 17..17: /mod_base="OTHER" /note="2'-OMe-nucleotide"
  modified_base 18..18: /mod_base="OTHER" /note="2'-fluoro-nucleotide"
  modified_base 19..19: /mod_base="OTHER" /note="2'-OMe-nucleotide"
  modified_base 20..20: /mod_base="OTHER" /note="2'-fluoro-nucleotide"
  modified_base 21..21: /mod_base="OTHER" /note="2'-OMe-nucleotide"
  modified_base 22..22: /mod_base="OTHER" /note="2'-fluoro-nucleotide"
  modified_base 23..23: /mod_base="OTHER" /note="2'-OMe-nucleotide"
  modified_base 24..24: /mod_base="OTHER" /note="2'-fluoro-nucleotide"
  modified_base 25..25: /mod_base="OTHER" /note="Inverted nucleotide"
ccaagacaauucaucauuugauuct

SEQ ID NO: 641 - DNA, 24 bp, Artificial Sequence
  Description of Artificial Sequence: Synthetic oligonucleotide
  Description of Combined DNA/RNA Molecule: Synthetic oligonucleotide
  N-term hydroxyl group
  C-term hydroxyl group
  modified_base 1..1: /mod_base="OTHER" /note="2'-OMe-nucleotide"
  modified_base 2..2: /mod_base="OTHER" /note="2'-OMe-nucleotide"
  modified_base 3..3: /mod_base="OTHER" /note="2'-OMe-nucleotide"
  modified_base 4..4: /mod_base="OTHER" /note="2'-fluoro-nucleotide"
  modified_base 5..5: /mod_base="OTHER" /note="2'-OMe-nucleotide"
  modified_base 6..6: /mod_base="OTHER" /note="2'-fluoro-nucleotide"
  modified_base 7..7: /mod_base="OTHER" /note="2'-OMe-nucleotide"
  modified_base 8..8: /mod_base="OTHER" /note="2'-fluoro-nucleotide"
  modified_base 9..9: /mod_base="OTHER" /note="2'-OMe-nucleotide"
  modified_base 10..10: /mod_base="OTHER" /note="2'-fluoro-nucleotide"
  modified_base 11..11: /mod_base="OTHER" /note="2'-OMe-nucleotide"
  modified_base 12..12: /mod_base="OTHER" /note="2'-fluoro-nucleotide"
  modified_base 13..13: /mod_base="OTHER" /note="2'-OMe-nucleotide"
  modified_base 14..14: /mod_base="OTHER" /note="2'-fluoro-nucleotide"
  modified_base 15..15: /mod_base="OTHER" /note="2'-OMe-nucleotide"
  modified_base 16..16: /mod_base="OTHER" /note="2'-fluoro-nucleotide"
  modified_base 17..17: /mod_base="OTHER" /note="2'-OMe-nucleotide"
  modified_base 18..18: /mod_base="OTHER" /note="2'-fluoro-nucleotide"
  modified_base 19..19: /mod_base="OTHER" /note="2'-OMe-nucleotide"
  modified_base 20..20: /mod_base="OTHER" /note="2'-fluoro-nucleotide"
  modified_base 21..21: /mod_base="OTHER" /note="2'-OMe-nucleotide"
  modified_base 22..22: /mod_base="OTHER" /note="2'-fluoro-nucleotide"
  modified_base 23..23: /mod_base="OTHER" /note="2'-OMe-nucleotide"
  modified_base 24..24: /mod_base="OTHER" /note="Inverted nucleotide"
ccaagacaauucaucauuugauut

SEQ ID NO: 642 - DNA, 22 bp, Artificial Sequence
  Description of Artificial Sequence: Synthetic oligonucleotide
  Description of Combined DNA/RNA Molecule: Synthetic oligonucleotide
  N-term hydroxyl group
  C-term hydroxyl group
  modified_base 1..1: /mod_base="OTHER" /note="2'-fluoro-nucleotide"
  modified_base 2..2: /mod_base="OTHER" /note="2'-OMe-nucleotide"
  modified_base 3..3: /mod_base="OTHER" /note="2'-fluoro-nucleotide"
  modified_base 4..4: /mod_base="OTHER" /note="2'-OMe-nucleotide"
  modified_base 5..5: /mod_base="OTHER" /note="2'-fluoro-nucleotide"
  modified_base 6..6: /mod_base="OTHER" /note="2'-OMe-nucleotide"
  modified_base 7..7: /mod_base="OTHER" /note="2'-fluoro-nucleotide"
  modified_base 8..8: /mod_base="OTHER" /note="2'-OMe-nucleotide"
  modified_base 9..9: /mod_base="OTHER" /note="2'-fluoro-nucleotide"
  modified_base 10..10: /mod_base="OTHER" /note="2'-OMe-nucleotide"
  modified_base 11..11: /mod_base="OTHER" /note="2'-fluoro-nucleotide"
  modified_base 12..12: /mod_base="OTHER" /note="2'-OMe-nucleotide"
  modified_base 13..13: /mod_base="OTHER" /note="2'-fluoro-nucleotide"
  modified_base 14..14: /mod_base="OTHER" /note="2'-OMe-nucleotide"
  modified_base 15..15: /mod_base="OTHER" /note="2'-fluoro-nucleotide"
  modified_base 16..16: /mod_base="OTHER" /note="2'-OMe-nucleotide"
  modified_base 17..17: /mod_base="OTHER" /note="2'-fluoro-nucleotide"
  modified_base 18..18: /mod_base="OTHER" /note="2'-OMe-nucleotide"
  modified_base 19..19: /mod_base="OTHER" /note="2'-fluoro-nucleotide"
  modified_base 20..20: /mod_base="OTHER" /note="2'-OMe-nucleotide"
  modified_base 21..21: /mod_base="OTHER" /note="dT"
  modified_base 22..22: /mod_base="OTHER" /note="dT"
aaucaaaugaugaauugucutt

SEQ ID NO: 643 - DNA, 21 bp, Artificial Sequence
  Description of Artificial Sequence: Synthetic oligonucleotide
  Description of Combined DNA/RNA Molecule: Synthetic oligonucleotide
  N-term hydroxyl group
  C-term hydroxyl group
  modified_base 1..1: /mod_base="OTHER" /note="2'-fluoro-nucleotide"
  modified_base 2..2: /mod_base="OTHER" /note="2'-fluoro-nucleotide"
  modified_base 3..3: /mod_base="OTHER" /note="2'-OMe-nucleotide"
  modified_base 4..4: /mod_base="OTHER" /note="2'-fluoro-nucleotide"
  modified_base 5..5: /mod_base="OTHER" /note="2'-OMe-nucleotide"
  modified_base 6..6: /mod_base="OTHER" /note="2'-fluoro-nucleotide"
  modified_base 7..7: /mod_base="OTHER" /note="2'-OMe-nucleotide"
  modified_base 8..8: /mod_base="OTHER" /note="2'-fluoro-nucleotide"
  modified_base 9..9: /mod_base="OTHER" /note="2'-OMe-nucleotide"
  modified_base 10..10: /mod_base="OTHER" /note="2'-fluoro-nucleotide"
  modified_base 11..11: /mod_base="OTHER" /note="2'-OMe-nucleotide"
  modified_base 12..12: /mod_base="OTHER" /note="2'-fluoro-nucleotide"
  modified_base 13..13: /mod_base="OTHER" /note="2'-OMe-nucleotide"
  modified_base 14..14: /mod_base="OTHER" /note="2'-fluoro-nucleotide"
  modified_base 15..15: /mod_base="OTHER" /note="2'-OMe-nucleotide"
  modified_base 16..16: /mod_base="OTHER" /note="2'-fluoro-nucleotide"
  modified_base 17..17: /mod_base="OTHER" /note="2'-OMe-nucleotide"
  modified_base 18..18: /mod_base="OTHER" /note="2'-fluoro-nucleotide"
  modified_base 19..19: /mod_base="OTHER" /note="2'-OMe-nucleotide"
  modified_base 20..20: /mod_base="OTHER" /note="dT"
  modified_base 21..21: /mod_base="OTHER" /note="dT"
gacuucuuaacucuauauatt

SEQ ID NO: 644 - DNA, 21 bp, Artificial Sequence
  Description of Artificial Sequence: Synthetic oligonucleotide
  Description of Combined DNA/RNA Molecule: Synthetic oligonucleotide
  N-term hydroxyl group
  C-term hydroxyl group
  modified_base 1..1: /mod_base="OTHER" /note="2'-fluoro-nucleotide"
  modified_base 2..2: /mod_base="OTHER" /note="2'-fluoro-nucleotide"
  modified_base 3..3: /mod_base="OTHER" /note="2'-OMe-nucleotide"
  modified_base 4..4: /mod_base="OTHER" /note="2'-fluoro-nucleotide"
  modified_base 5..5: /mod_base="OTHER" /note="2'-OMe-nucleotide"
  modified_base 6..6: /mod_base="OTHER" /note="2'-fluoro-nucleotide"
  modified_base 7..7: /mod_base="OTHER" /note="2'-OMe-nucleotide"
  modified_base 8..8: /mod_base="OTHER" /note="2'-fluoro-nucleotide"
  modified_base 9..9: /mod_base="OTHER" /note="2'-OMe-nucleotide"
  modified_base 10..10: /mod_base="OTHER" /note="2'-fluoro-nucleotide"
  modified_base 11..11: /mod_base="OTHER" /note="2'-OMe-nucleotide"
  modified_base 12..12: /mod_base="OTHER" /note="2'-fluoro-nucleotide"
  modified_base 13..13: /mod_base="OTHER" /note="2'-OMe-nucleotide"
  modified_base 14..14: /mod_base="OTHER" /note="2'-fluoro-nucleotide"
  modified_base 15..15: /mod_base="OTHER" /note="2'-OMe-nucleotide"
  modified_base 16..16: /mod_base="OTHER" /note="2'-fluoro-nucleotide"
  modified_base 17..17: /mod_base="OTHER" /note="2'-OMe-nucleotide"
  modified_base 18..18: /mod_base="OTHER" /note="2'-fluoro-nucleotide"
  modified_base 19..19: /mod_base="OTHER" /note="2'-OMe-nucleotide"
  modified_base 20..20: /mod_base="OTHER" /note="dT"
  modified_base 21..21: /mod_base="OTHER" /note="dT"
agacuucuuaacucuauautt

SEQ ID NO: 645 - DNA, 21 bp, Artificial Sequence
  Description of Artificial Sequence: Synthetic oligonucleotide
  Description of Combined DNA/RNA Molecule: Synthetic oligonucleotide
  N-term hydroxyl group
  C-term hydroxyl group
  modified_base 1..1: /mod_base="OTHER" /note="2'-fluoro-nucleotide"
  modified_base 2..2: /mod_base="OTHER" /note="2'-fluoro-nucleotide"
  modified_base 3..3: /mod_base="OTHER" /note="2'-OMe-nucleotide"
  modified_base 4..4: /mod_base="OTHER" /note="2'-fluoro-nucleotide"
  modified_base 5..5: /mod_base="OTHER" /note="2'-OMe-nucleotide"
  modified_base 6..6: /mod_base="OTHER" /note="2'-fluoro-nucleotide"
  modified_base 7..7: /mod_base="OTHER" /note="2'-OMe-nucleotide"
  modified_base 8..8: /mod_base="OTHER" /note="2'-fluoro-nucleotide"
  modified_base 9..9: /mod_base="OTHER" /note="2'-OMe-nucleotide"
  modified_base 10..10: /mod_base="OTHER" /note="2'-fluoro-nucleotide"
  modified_base 11..11: /mod_base="OTHER" /note="2'-OMe-nucleotide"
  modified_base 12..12: /mod_base="OTHER" /note="2'-fluoro-nucleotide"
  modified_base 13..13: /mod_base="OTHER" /note="2'-OMe-nucleotide"
  modified_base 14..14: /mod_base="OTHER" /note="2'-fluoro-nucleotide"
  modified_base 15..15: /mod_base="OTHER" /note="2'-OMe-nucleotide"
  modified_base 16..16: /mod_base="OTHER" /note="2'-fluoro-nucleotide"
  modified_base 17..17: /mod_base="OTHER" /note="2'-OMe-nucleotide"
  modified_base 18..18: /mod_base="OTHER" /note="2'-fluoro-nucleotide"
  modified_base 19..19: /mod_base="OTHER" /note="2'-OMe-nucleotide"
  modified_base 20..20: /mod_base="OTHER" /note="dT"
  modified_base 21..21: /mod_base="OTHER" /note="dT"
uagacuucuuaacucuauatt

SEQ ID NO: 646 - DNA, 21 bp, Artificial Sequence
  Description of Artificial Sequence: Synthetic oligonucleotide
  Description of Combined DNA/RNA Molecule: Synthetic oligonucleotide
  N-term hydroxyl group
  C-term hydroxyl group
  modified_base 1..1: /mod_base="OTHER" /note="2'-fluoro-nucleotide"
  modified_base 2..2: /mod_base="OTHER" /note="2'-fluoro-nucleotide"
  modified_base 3..3: /mod_base="OTHER" /note="2'-OMe-nucleotide"
  modified_base 4..4: /mod_base="OTHER" /note="2'-fluoro-nucleotide"
  modified_base 5..5: /mod_base="OTHER" /note="2'-OMe-nucleotide"
  modified_base 6..6: /mod_base="OTHER" /note="2'-fluoro-nucleotide"
  modified_base 7..7: /mod_base="OTHER" /note="2'-OMe-nucleotide"
  modified_base 8..8: /mod_base="OTHER" /note="2'-fluoro-nucleotide"
  modified_base 9..9: /mod_base="OTHER" /note="2'-OMe-nucleotide"
  modified_base 10..10: /mod_base="OTHER" /note="2'-fluoro-nucleotide"
  modified_base 11..11: /mod_base="OTHER" /note="2'-OMe-nucleotide"
  modified_base 12..12: /mod_base="OTHER" /note="2'-fluoro-nucleotide"
  modified_base 13..13: /mod_base="OTHER" /note="2'-OMe-nucleotide"
  modified_base 14..14: /mod_base="OTHER" /note="2'-fluoro-nucleotide"
  modified_base 15..15: /mod_base="OTHER" /note="2'-OMe-nucleotide"
  modified_base 16..16: /mod_base="OTHER" /note="2'-fluoro-nucleotide"
  modified_base 17..17: /mod_base="OTHER" /note="2'-OMe-nucleotide"
  modified_base 18..18: /mod_base="OTHER" /note="2'-fluoro-nucleotide"
  modified_base 19..19: /mod_base="OTHER" /note="2'-OMe-nucleotide"
  modified_base 20..20: /mod_base="OTHER" /note="dT"
  modified_base 21..21: /mod_base="OTHER" /note="dT"
agaccuagacuucuuaacutt

SEQ ID NO: 647 - DNA, 21 bp, Artificial Sequence
  Description of Artificial Sequence: Synthetic oligonucleotide
  Description of Combined DNA/RNA Molecule: Synthetic oligonucleotide
  N-term hydroxyl group
  C-term hydroxyl group
  modified_base 1..1: /mod_base="OTHER" /note="2'-fluoro-nucleotide"
  modified_base 2..2: /mod_base="OTHER" /note="2'-fluoro-nucleotide"
  modified_base 3..3: /mod_base="OTHER" /note="2'-OMe-nucleotide"
  modified_base 4..4: /mod_base="OTHER" /note="2'-fluoro-nucleotide"
  modified_base 5..5: /mod_base="OTHER" /note="2'-OMe-nucleotide"
  modified_base 6..6: /mod_base="OTHER" /note="2'-fluoro-nucleotide"
  modified_base 7..7: /mod_base="OTHER" /note="2'-OMe-nucleotide"
  modified_base 8..8: /mod_base="OTHER" /note="2'-fluoro-nucleotide"
  modified_base 9..9: /mod_base="OTHER" /note="2'-OMe-nucleotide"
  modified_base 10..10: /mod_base="OTHER" /note="2'-fluoro-nucleotide"
  modified_base 11..11: /mod_base="OTHER" /note="2'-OMe-nucleotide"
  modified_base 12..12: /mod_base="OTHER" /note="2'-fluoro-nucleotide"
  modified_base 13..13: /mod_base="OTHER" /note="2'-OMe-nucleotide"
  modified_base 14..14: /mod_base="OTHER" /note="2'-fluoro-nucleotide"
  modified_base 15..15: /mod_base="OTHER" /note="2'-OMe-nucleotide"
  modified_base 16..16: /mod_base="OTHER" /note="2'-fluoro-nucleotide"
  modified_base 17..17: /mod_base="OTHER" /note="2'-OMe-nucleotide"
  modified_base 18..18: /mod_base="OTHER" /note="2'-fluoro-nucleotide"
  modified_base 19..19: /mod_base="OTHER" /note="2'-OMe-nucleotide"
  modified_base 20..20: /mod_base="OTHER" /note="dT"
  modified_base 21..21: /mod_base="OTHER" /note="dT"
cagaccuagacuucuuaactt

SEQ ID NO: 648 - DNA, 21 bp, Artificial Sequence
  Description of Artificial Sequence: Synthetic oligonucleotide
  Description of Combined DNA/RNA Molecule: Synthetic oligonucleotide
  N-term hydroxyl group
  C-term hydroxyl group
  modified_base 1..1: /mod_base="OTHER" /note="2'-fluoro-nucleotide"
  modified_base 2..2: /mod_base="OTHER" /note="2'-fluoro-nucleotide"
  modified_base 3..3: /mod_base="OTHER" /note="2'-OMe-nucleotide"
  modified_base 4..4: /mod_base="OTHER" /note="2'-fluoro-nucleotide"
  modified_base 5..5: /mod_base="OTHER" /note="2'-OMe-nucleotide"
  modified_base 6..6: /mod_base="OTHER" /note="2'-fluoro-nucleotide"
  modified_base 7..7: /mod_base="OTHER" /note="2'-OMe-nucleotide"
  modified_base 8..8: /mod_base="OTHER" /note="2'-fluoro-nucleotide"
  modified_base 9..9: /mod_base="OTHER" /note="2'-OMe-nucleotide"
  modified_base 10..10: /mod_base="OTHER" /note="2'-fluoro-nucleotide"
  modified_base 11..11: /mod_base="OTHER" /note="2'-OMe-nucleotide"
  modified_base 12..12: /mod_base="OTHER" /note="2'-fluoro-nucleotide"
  modified_base 13..13: /mod_base="OTHER" /note="2'-OMe-nucleotide"
  modified_base 14..14: /mod_base="OTHER" /note="2'-fluoro-nucleotide"
  modified_base 15..15: /mod_base="OTHER" /note="2'-OMe-nucleotide"
  modified_base 16..16: /mod_base="OTHER" /note="2'-fluoro-nucleotide"
  modified_base 17..17: /mod_base="OTHER" /note="2'-OMe-nucleotide"
  modified_base 18..18: /mod_base="OTHER" /note="2'-fluoro-nucleotide"
  modified_base 19..19: /mod_base="OTHER" /note="2'-OMe-nucleotide"
  modified_base 20..20: /mod_base="OTHER" /note="dT"
  modified_base 21..21: /mod_base="OTHER" /note="dT"
gcagaccuagacuucuuaatt

SEQ ID NO: 649 - DNA, 21 bp, Artificial Sequence
  Description of Artificial Sequence: Synthetic oligonucleotide
  Description of Combined DNA/RNA Molecule: Synthetic oligonucleotide
  N-term hydroxyl group
  C-term hydroxyl group
  modified_base 1..1: /mod_base="OTHER" /note="2'-fluoro-nucleotide"
  modified_base 2..2: /mod_base="OTHER" /note="2'-fluoro-nucleotide"
  modified_base 3..3: /mod_base="OTHER" /note="2'-OMe-nucleotide"
  modified_base 4..4: /mod_base="OTHER" /note="2'-fluoro-nucleotide"
  modified_base 5..5: /mod_base="OTHER" /note="2'-OMe-nucleotide"
  modified_base 6..6: /mod_base="OTHER" /note="2'-fluoro-nucleotide"
  modified_base 7..7: /mod_base="OTHER" /note="2'-OMe-nucleotide"
  modified_base 8..8: /mod_base="OTHER" /note="2'-fluoro-nucleotide"
  modified_base 9..9: /mod_base="OTHER" /note="2'-OMe-nucleotide"
  modified_base 10..10: /mod_base="OTHER" /note="2'-fluoro-nucleotide"
  modified_base 11..11: /mod_base="OTHER" /note="2'-OMe-nucleotide"
  modified_base 12..12: /mod_base="OTHER" /note="2'-fluoro-nucleotide"
  modified_base 13..13: /mod_base="OTHER" /note="2'-OMe-nucleotide"
  modified_base 14..14: /mod_base="OTHER" /note="2'-fluoro-nucleotide"
  modified_base 15..15: /mod_base="OTHER" /note="2'-OMe-nucleotide"
  modified_base 16..16: /mod_base="OTHER" /note="2'-fluoro-nucleotide"
  modified_base 17..17: /mod_base="OTHER" /note="2'-OMe-nucleotide"
  modified_base 18..18: /mod_base="OTHER" /note="2'-fluoro-nucleotide"
  modified_base 19..19: /mod_base="OTHER" /note="2'-OMe-nucleotide"
  modified_base 20..20: /mod_base="OTHER" /note="dT"
  modified_base 21..21: /mod_base="OTHER" /note="dT"
agcagaccuagacuucuuatt

SEQ ID NO: 650 - DNA, 21 bp, Artificial Sequence
  Description of Artificial Sequence: Synthetic oligonucleotide
  Description of Combined DNA/RNA Molecule: Synthetic oligonucleotide
  N-term hydroxyl group
  C-term hydroxyl group
  modified_base 1..1: /mod_base="OTHER" /note="2'-fluoro-nucleotide"
  modified_base 2..2: /mod_base="OTHER" /note="2'-fluoro-nucleotide"
  modified_base 3..3: /mod_base="OTHER" /note="2'-OMe-nucleotide"
  modified_base 4..4: /mod_base="OTHER" /note="2'-fluoro-nucleotide"
  modified_base 5..5: /mod_base="OTHER" /note="2'-OMe-nucleotide"
  modified_base 6..6: /mod_base="OTHER" /note="2'-fluoro-nucleotide"
  modified_base 7..7: /mod_base="OTHER" /note="2'-OMe-nucleotide"
  modified_base 8..8: /mod_base="OTHER" /note="2'-fluoro-nucleotide"
  modified_base 9..9: /mod_base="OTHER" /note="2'-OMe-nucleotide"
  modified_base 10..10: /mod_base="OTHER" /note="2'-fluoro-nucleotide"
  modified_base 11..11: /mod_base="OTHER" /note="2'-OMe-nucleotide"
  modified_base 12..12: /mod_base="OTHER" /note="2'-fluoro-nucleotide"
  modified_base 13..13: /mod_base="OTHER" /note="2'-OMe-nucleotide"
  modified_base 14..14: /mod_base="OTHER" /note="2'-fluoro-nucleotide"
  modified_base 15..15: /mod_base="OTHER" /note="2'-OMe-nucleotide"
  modified_base 16..16: /mod_base="OTHER" /note="2'-fluoro-nucleotide"
  modified_base 17..17: /mod_base="OTHER" /note="2'-OMe-nucleotide"
  modified_base 18..18: /mod_base="OTHER" /note="2'-fluoro-nucleotide"
  modified_base 19..19: /mod_base="OTHER" /note="2'-OMe-nucleotide"
  modified_base 20..20: /mod_base="OTHER" /note="dT"
  modified_base 21..21: /mod_base="OTHER" /note="dT"
aagcagaccuagacuucuutt

SEQ ID NO: 651 - DNA, 21 bp, Artificial Sequence
  Description of Artificial Sequence: Synthetic oligonucleotide
  Description of Combined DNA/RNA Molecule: Synthetic oligonucleotide
  N-term hydroxyl group
  C-term hydroxyl group
  modified_base 1..1: /mod_base="OTHER" /note="2'-fluoro-nucleotide"
  modified_base 2..2: /mod_base="OTHER" /note="2'-fluoro-nucleotide"
  modified_base 3..3: /mod_base="OTHER" /note="2'-OMe-nucleotide"
  modified_base 4..4: /mod_base="OTHER" /note="2'-fluoro-nucleotide"
  modified_base 5..5: /mod_base="OTHER" /note="2'-OMe-nucleotide"
  modified_base 6..6: /mod_base="OTHER" /note="2'-fluoro-nucleotide"
  modified_base 7..7: /mod_base="OTHER" /note="2'-OMe-nucleotide"
  modified_base 8..8: /mod_base="OTHER" /note="2'-fluoro-nucleotide"
  modified_base 9..9: /mod_base="OTHER" /note="2'-OMe-nucleotide"
  modified_base 10..10: /mod_base="OTHER" /note="2'-fluoro-nucleotide"
  modified_base 11..11: /mod_base="OTHER" /note="2'-OMe-nucleotide"
  modified_base 12..12: /mod_base="OTHER" /note="2'-fluoro-nucleotide"
  modified_base 13..13: /mod_base="OTHER" /note="2'-OMe-nucleotide"
  modified_base 14..14: /mod_base="OTHER" /note="2'-fluoro-nucleotide"
  modified_base 15..15: /mod_base="OTHER" /note="2'-OMe-nucleotide"
  modified_base 16..16: /mod_base="OTHER" /note="2'-fluoro-nucleotide"
  modified_base 17..17: /mod_base="OTHER" /note="2'-OMe-nucleotide"
  modified_base 18..18: /mod_base="OTHER" /note="2'-fluoro-nucleotide"
  modified_base 19..19: /mod_base="OTHER" /note="2'-OMe-nucleotide"
  modified_base 20..20: /mod_base="OTHER" /note="dT"
  modified_base 21..21: /mod_base="OTHER" /note="dT"
gaagcagaccuagacuucutt

SEQ ID NO: 652 - DNA, 21 bp, Artificial Sequence
  Description of Artificial Sequence: Synthetic oligonucleotide
  Description of Combined DNA/RNA Molecule: Synthetic oligonucleotide
  N-term hydroxyl group
  C-term hydroxyl group
  modified_base 1..1: /mod_base="OTHER" /note="2'-fluoro-nucleotide"
  modified_base 2..2: /mod_base="OTHER" /note="2'-fluoro-nucleotide"
  modified_base 3..3: /mod_base="OTHER" /note="2'-OMe-nucleotide"
  modified_base 4..4: /mod_base="OTHER" /note="2'-fluoro-nucleotide"
  modified_base 5..5: /mod_base="OTHER" /note="2'-OMe-nucleotide"
  modified_base 6..6: /mod_base="OTHER" /note="2'-fluoro-nucleotide"
  modified_base 7..7: /mod_base="OTHER" /note="2'-OMe-nucleotide"
  modified_base 8..8: /mod_base="OTHER" /note="2'-fluoro-nucleotide"
  modified_base 9..9: /mod_base="OTHER" /note="2'-OMe-nucleotide"
  modified_base 10..10: /mod_base="OTHER" /note="2'-fluoro-nucleotide"
  modified_base 11..11: /mod_base="OTHER" /note="2'-OMe-nucleotide"
  modified_base 12..12: /mod_base="OTHER" /note="2'-fluoro-nucleotide"
  modified_base 13..13: /mod_base="OTHER" /note="2'-OMe-nucleotide"
  modified_base 14..14: /mod_base="OTHER" /note="2'-fluoro-nucleotide"
  modified_base 15..15: /mod_base="OTHER" /note="2'-OMe-nucleotide"
  modified_base 16..16: /mod_base="OTHER" /note="2'-fluoro-nucleotide"
  modified_base 17..17: /mod_base="OTHER" /note="2'-OMe-nucleotide"
  modified_base 18..18: /mod_base="OTHER" /note="2'-fluoro-nucleotide"
  modified_base 19..19: /mod_base="OTHER" /note="2'-OMe-nucleotide"
  modified_base 20..20: /mod_base="OTHER" /note="dT"
  modified_base 21..21: /mod_base="OTHER" /note="dT"
ggaagcagaccuagacuuctt

SEQ ID NO: 653 - DNA, 21 bp, Artificial Sequence
  Description of Artificial Sequence: Synthetic oligonucleotide
  Description of Combined DNA/RNA Molecule: Synthetic oligonucleotide
  N-term hydroxyl group
  C-term hydroxyl group
  modified_base 1..1: /mod_base="OTHER" /note="2'-fluoro-nucleotide"
  modified_base 2..2: /mod_base="OTHER" /note="2'-fluoro-nucleotide"
  modified_base 3..3: /mod_base="OTHER" /note="2'-OMe-nucleotide"
  modified_base 4..4: /mod_base="OTHER" /note="2'-fluoro-nucleotide"
  modified_base 5..5: /mod_base="OTHER" /note="2'-OMe-nucleotide"
  modified_base 6..6: /mod_base="OTHER" /note="2'-fluoro-nucleotide"
  modified_base 7..7: /mod_base="OTHER" /note="2'-OMe-nucleotide"
  modified_base 8..8: /mod_base="OTHER" /note="2'-fluoro-nucleotide"
  modified_base 9..9: /mod_base="OTHER" /note="2'-OMe-nucleotide"
  modified_base 10..10: /mod_base="OTHER" /note="2'-fluoro-nucleotide"
  modified_base 11..11: /mod_base="OTHER" /note="2'-OMe-nucleotide"
  modified_base 12..12: /mod_base="OTHER" /note="2'-fluoro-nucleotide"
  modified_base 13..13: /mod_base="OTHER" /note="2'-OMe-nucleotide"
  modified_base 14..14: /mod_base="OTHER" /note="2'-fluoro-nucleotide"
  modified_base 15..15: /mod_base="OTHER" /note="2'-OMe-nucleotide"
  modified_base 16..16: /mod_base="OTHER" /note="2'-fluoro-nucleotide"
  modified_base 17..17: /mod_base="OTHER" /note="2'-OMe-nucleotide"
  modified_base 18..18: /mod_base="OTHER" /note="2'-fluoro-nucleotide"
  modified_base 19..19: /mod_base="OTHER" /note="2'-OMe-nucleotide"
  modified_base 20..20: /mod_base="OTHER" /note="dT"
  modified_base 21..21: /mod_base="OTHER" /note="dT"
uggaagcagaccuagacuutt

SEQ ID NO: 654 - DNA, 21 bp, Artificial Sequence
  Description of Artificial Sequence: Synthetic oligonucleotide
  Description of Combined DNA/RNA Molecule: Synthetic oligonucleotide
  N-term hydroxyl group
  C-term hydroxyl group
  modified_base 1..1: /mod_base="OTHER" /note="2'-fluoro-nucleotide"
  modified_base 2..2: /mod_base="OTHER" /note="2'-fluoro-nucleotide"
  modified_base 3..3: /mod_base="OTHER" /note="2'-OMe-nucleotide"
  modified_base 4..4: /mod_base="OTHER" /note="2'-fluoro-nucleotide"
  modified_base 5..5: /mod_base="OTHER" /note="2'-OMe-nucleotide"
  modified_base 6..6: /mod_base="OTHER" /note="2'-fluoro-nucleotide"
  modified_base 7..7: /mod_base="OTHER" /note="2'-OMe-nucleotide"
  modified_base 8..8: /mod_base="OTHER" /note="2'-fluoro-nucleotide"
  modified_base 9..9: /mod_base="OTHER" /note="2'-OMe-nucleotide"
  modified_base 10..10: /mod_base="OTHER" /note="2'-fluoro-nucleotide"
  modified_base 11..11: /mod_base="OTHER" /note="2'-OMe-nucleotide"
  modified_base 12..12: /mod_base="OTHER" /note="2'-fluoro-nucleotide"
  modified_base 13..13: /mod_base="OTHER" /note="2'-OMe-nucleotide"
  modified_base 14..14: /mod_base="OTHER" /note="2'-fluoro-nucleotide"
  modified_base 15..15: /mod_base="OTHER" /note="2'-OMe-nucleotide"
  modified_base 16..16: /mod_base="OTHER" /note="2'-fluoro-nucleotide"
  modified_base 17..17: /mod_base="OTHER" /note="2'-OMe-nucleotide"
  modified_base 18..18: /mod_base="OTHER" /note="2'-fluoro-nucleotide"
  modified_base 19..19: /mod_base="OTHER" /note="2'-OMe-nucleotide"
  modified_base 20..20: /mod_base="OTHER" /note="dT"
  modified_base 21..21: /mod_base="OTHER" /note="dT"
caaaugaugaauugucuugtt

SEQ ID NO: 655 - DNA, 21 bp, Artificial Sequence
  Description of Artificial Sequence: Synthetic oligonucleotide
  Description of Combined DNA/RNA Molecule: Synthetic oligonucleotide
  N-term hydroxyl group
  C-term hydroxyl group
  modified_base 1..1: /mod_base="OTHER" /note="2'-fluoro-nucleotide"
  modified_base 2..2: /mod_base="OTHER" /note="2'-fluoro-nucleotide"
  modified_base 3..3: /mod_base="OTHER" /note="2'-OMe-nucleotide"
  modified_base 4..4: /mod_base="OTHER" /note="2'-fluoro-nucleotide"
  modified_base 5..5: /mod_base="OTHER" /note="2'-OMe-nucleotide"
  modified_base 6..6: /mod_base="OTHER" /note="2'-fluoro-nucleotide"
  modified_base 7..7: /mod_base="OTHER" /note="2'-OMe-nucleotide"
  modified_base 8..8: /mod_base="OTHER" /note="2'-fluoro-nucleotide"
  modified_base 9..9: /mod_base="OTHER" /note="2'-OMe-nucleotide"
  modified_base 10..10: /mod_base="OTHER" /note="2'-fluoro-nucleotide"
  modified_base 11..11: /mod_base="OTHER" /note="2'-OMe-nucleotide"
  modified_base 12..12: /mod_base="OTHER" /note="2'-fluoro-nucleotide"
  modified_base 13..13: /mod_base="OTHER" /note="2'-OMe-nucleotide"
  modified_base 14..14: /mod_base="OTHER" /note="2'-fluoro-nucleotide"
  modified_base 15..15: /mod_base="OTHER" /note="2'-OMe-nucleotide"
  modified_base 16..16: /mod_base="OTHER" /note="2'-fluoro-nucleotide"
  modified_base 17..17: /mod_base="OTHER" /note="2'-OMe-nucleotide"
  modified_base 18..18: /mod_base="OTHER" /note="2'-fluoro-nucleotide"
  modified_base 19..19: /mod_base="OTHER" /note="2'-OMe-nucleotide"
  modified_base 20..20: /mod_base="OTHER" /note="dT"
  modified_base 21..21: /mod_base="OTHER" /note="dT"
aucaaaugaugaauugucutt

SEQ ID NO: 656 - DNA, 21 bp, Artificial Sequence
  Description of Artificial Sequence: Synthetic oligonucleotide
  Description of Combined DNA/RNA Molecule: Synthetic oligonucleotide
  N-term hydroxyl group
  C-term hydroxyl group
  modified_base 1..1: /mod_base="OTHER" /note="2'-fluoro-nucleotide"
  modified_base 2..2: /mod_base="OTHER" /note="2'-fluoro-nucleotide"
  modified_base 3..3: /mod_base="OTHER" /note="2'-OMe-nucleotide"
  modified_base 4..4: /mod_base="OTHER" /note="2'-fluoro-nucleotide"
  modified_base 5..5: /mod_base="OTHER" /note="2'-OMe-nucleotide"
  modified_base 6..6: /mod_base="OTHER" /note="2'-fluoro-nucleotide"
  modified_base 7..7: /mod_base="OTHER" /note="2'-OMe-nucleotide"
  modified_base 8..8: /mod_base="OTHER" /note="2'-fluoro-nucleotide"
  modified_base 9..9: /mod_base="OTHER" /note="2'-OMe-nucleotide"
  modified_base 10..10: /mod_base="OTHER" /note="2'-fluoro-nucleotide"
  modified_base 11..11: /mod_base="OTHER" /note="2'-OMe-nucleotide"
  modified_base 12..12: /mod_base="OTHER" /note="2'-fluoro-nucleotide"
  modified_base 13..13: /mod_base="OTHER" /note="2'-OMe-nucleotide"
  modified_base 14..14: /mod_base="OTHER" /note="2'-fluoro-nucleotide"
  modified_base 15..15: /mod_base="OTHER" /note="2'-OMe-nucleotide"
  modified_base 16..16: /mod_base="OTHER" /note="2'-fluoro-nucleotide"
  modified_base 17..17: /mod_base="OTHER" /note="2'-OMe-nucleotide"
  modified_base 18..18: /mod_base="OTHER" /note="2'-fluoro-nucleotide"
  modified_base 19..19: /mod_base="OTHER" /note="2'-OMe-nucleotide"
  modified_base 20..20: /mod_base="OTHER" /note="dT"
  modified_base 21..21: /mod_base="OTHER" /note="dT"
aaucaaaugaugaauuguctt

SEQ ID NO: 657 - DNA, 21 bp, Artificial Sequence
  Description of Artificial Sequence: Synthetic oligonucleotide
  Description of Combined DNA/RNA Molecule: Synthetic oligonucleotide
  N-term hydroxyl group
  C-term hydroxyl group
  modified_base 1..1: /mod_base="OTHER" /note="2'-fluoro-nucleotide"
  modified_base 2..2: /mod_base="OTHER" /note="2'-fluoro-nucleotide"
  modified_base 3..3: /mod_base="OTHER" /note="2'-OMe-nucleotide"
  modified_base 4..4: /mod_base="OTHER" /note="2'-fluoro-nucleotide"
  modified_base 5..5: /mod_base="OTHER" /note="2'-OMe-nucleotide"
  modified_base 6..6: /mod_base="OTHER" /note="2'-fluoro-nucleotide"
  modified_base 7..7: /mod_base="OTHER" /note="2'-OMe-nucleotide"
  modified_base 8..8: /mod_base="OTHER" /note="2'-fluoro-nucleotide"
  modified_base 9..9: /mod_base="OTHER" /note="2'-OMe-nucleotide"
  modified_base 10..10: /mod_base="OTHER" /note="2'-fluoro-nucleotide"
  modified_base 11..11: /mod_base="OTHER" /note="2'-OMe-nucleotide"
  modified_base 12..12: /mod_base="OTHER" /note="2'-fluoro-nucleotide"
  modified_base 13..13: /mod_base="OTHER" /note="2'-OMe-nucleotide"
  modified_base 14..14: /mod_base="OTHER" /note="2'-fluoro-nucleotide"
  modified_base 15..15: /mod_base="OTHER" /note="2'-OMe-nucleotide"
  modified_base 16..16: /mod_base="OTHER" /note="2'-fluoro-nucleotide"
  modified_base 17..17: /mod_base="OTHER" /note="2'-OMe-nucleotide"
  modified_base 18..18: /mod_base="OTHER" /note="2'-fluoro-nucleotide"
  modified_base 19..19: /mod_base="OTHER" /note="2'-OMe-nucleotide"
  modified_base 20..20: /mod_base="OTHER" /note="dT"
  modified_base 21..21: /mod_base="OTHER" /note="dT"
gaaucaaaugaugaauugutt

SEQ ID NO: 658 - DNA, 21 bp, Artificial Sequence
  Description of Artificial Sequence: Synthetic oligonucleotide
  Description of Combined DNA/RNA Molecule: Synthetic oligonucleotide
  N-term hydroxyl group
  C-term hydroxyl group
  modified_base 1..1: /mod_base="OTHER" /note="2'-fluoro-nucleotide"
  modified_base 2..2: /mod_base="OTHER" /note="2'-fluoro-nucleotide"
  modified_base 3..3: /mod_base="OTHER" /note="2'-OMe-nucleotide"
  modified_base 4..4: /mod_base="OTHER" /note="2'-fluoro-nucleotide"
  modified_base 5..5: /mod_base="OTHER" /note="2'-OMe-nucleotide"
  modified_base 6..6: /mod_base="OTHER" /note="2'-fluoro-nucleotide"
  modified_base 7..7: /mod_base="OTHER" /note="2'-OMe-nucleotide"
  modified_base 8..8: /mod_base="OTHER" /note="2'-fluoro-nucleotide"
  modified_base 9..9: /mod_base="OTHER" /note="2'-OMe-nucleotide"
  modified_base 10..10: /mod_base="OTHER" /note="2'-fluoro-nucleotide"
  modified_base 11..11: /mod_base="OTHER" /note="2'-OMe-nucleotide"
  modified_base 12..12: /mod_base="OTHER" /note="2'-fluoro-nucleotide"
  modified_base 13..13: /mod_base="OTHER" /note="2'-OMe-nucleotide"
  modified_base 14..14: /mod_base="OTHER" /note="2'-fluoro-nucleotide"
  modified_base 15..15: /mod_base="OTHER" /note="2'-OMe-nucleotide"
  modified_base 16..16: /mod_base="OTHER" /note="2'-fluoro-nucleotide"
  modified_base 17..17: /mod_base="OTHER" /note="2'-OMe-nucleotide"
  modified_base 18..18: /mod_base="OTHER" /note="2'-fluoro-nucleotide"
  modified_base 19..19: /mod_base="OTHER" /note="2'-OMe-nucleotide"
  modified_base 20..20: /mod_base="OTHER" /note="dT"
  modified_base 21..21: /mod_base="OTHER" /note="dT"
uggagaaggucuuugaugctt

SEQ ID NO: 659 - DNA, 21 bp, Artificial Sequence
  Description of Artificial Sequence: Synthetic oligonucleotide
  Description of Combined DNA/RNA Molecule: Synthetic oligonucleotide
  N-term hydroxyl group
  C-term hydroxyl group
  modified_base 1..1: /mod_base="OTHER" /note="2'-fluoro-nucleotide"
  modified_base 2..2: /mod_base="OTHER" /note="2'-fluoro-nucleotide"
  modified_base 3..3: /mod_base="OTHER" /note="2'-OMe-nucleotide"
  modified_base 4..4: /mod_base="OTHER" /note="2'-fluoro-nucleotide"
  modified_base 5..5: /mod_base="OTHER" /note="2'-OMe-nucleotide"
  modified_base 6..6: /mod_base="OTHER" /note="2'-fluoro-nucleotide"
  modified_base 7..7: /mod_base="OTHER" /note="2'-OMe-nucleotide"
  modified_base 8..8: /mod_base="OTHER" /note="2'-fluoro-nucleotide"
  modified_base 9..9: /mod_base="OTHER" /note="2'-OMe-nucleotide"
  modified_base 10..10: /mod_base="OTHER" /note="2'-fluoro-nucleotide"
  modified_base 11..11: /mod_base="OTHER" /note="2'-OMe-nucleotide"
  modified_base 12..12: /mod_base="OTHER" /note="2'-fluoro-nucleotide"
  modified_base 13..13: /mod_base="OTHER" /note="2'-OMe-nucleotide"
  modified_base 14..14: /mod_base="OTHER" /note="2'-fluoro-nucleotide"
  modified_base 15..15: /mod_base="OTHER" /note="2'-OMe-nucleotide"
  modified_base 16..16: /mod_base="OTHER" /note="2'-fluoro-nucleotide"
  modified_base 17..17: /mod_base="OTHER" /note="2'-OMe-nucleotide"
  modified_base 18..18: /mod_base="OTHER" /note="2'-fluoro-nucleotide"
  modified_base 19..19: /mod_base="OTHER" /note="2'-OMe-nucleotide"
  modified_base 20..20: /mod_base="OTHER" /note="dT"
  modified_base 21..21: /mod_base="OTHER" /note="dT"
gcuuggaagauagagaaautt

SEQ ID NO: 660 - DNA, 21 bp, Artificial Sequence
  Description of Artificial Sequence: Synthetic oligonucleotide
  Description of Combined DNA/RNA Molecule: Synthetic oligonucleotide
  N-term hydroxyl group
  C-term hydroxyl group
  modified_base 1..1: /mod_base="OTHER" /note="2'-fluoro-nucleotide"
  modified_base 2..2: /mod_base="OTHER" /note="2'-fluoro-nucleotide"
  modified_base 3..3: /mod_base="OTHER" /note="2'-OMe-nucleotide"
  modified_base 4..4: /mod_base="OTHER" /note="2'-fluoro-nucleotide"
  modified_base 5..5: /mod_base="OTHER" /note="2'-OMe-nucleotide"
  modified_base 6..6: /mod_base="OTHER" /note="2'-fluoro-nucleotide"
  modified_base 7..7: /mod_base="OTHER" /note="2'-OMe-nucleotide"
  modified_base 8..8: /mod_base="OTHER" /note="2'-fluoro-nucleotide"
  modified_base 9..9: /mod_base="OTHER" /note="2'-OMe-nucleotide"
  modified_base 10..10: /mod_base="OTHER" /note="2'-fluoro-nucleotide"
  modified_base 11..11: /mod_base="OTHER" /note="2'-OMe-nucleotide"
  modified_base 12..12: /mod_base="OTHER" /note="2'-fluoro-nucleotide"
  modified_base 13..13: /mod_base="OTHER" /note="2'-OMe-nucleotide"
  modified_base 14..14: /mod_base="OTHER" /note="2'-fluoro-nucleotide"
  modified_base 15..15: /mod_base="OTHER" /note="2'-OMe-nucleotide"
  modified_base 16..16: /mod_base="OTHER" /note="2'-fluoro-nucleotide"
  modified_base 17..17: /mod_base="OTHER" /note="2'-OMe-nucleotide"
  modified_base 18..18: /mod_base="OTHER" /note="2'-fluoro-nucleotide"
  modified_base 19..19: /mod_base="OTHER" /note="2'-OMe-nucleotide"
  modified_base 20..20: /mod_base="OTHER" /note="dT"
  modified_base 21..21: /mod_base="OTHER" /note="dT"
uuggcuuggaagauagagatt

SEQ ID NO: 661 - DNA, 21 bp, Artificial Sequence
  Description of Artificial Sequence: Synthetic oligonucleotide
  Description of Combined DNA/RNA Molecule: Synthetic oligonucleotide
  N-term hydroxyl group
  C-term hydroxyl group
  modified_base 1..1: /mod_base="OTHER" /note="2'-fluoro-nucleotide"
  modified_base 2..2: /mod_base="OTHER" /note="2'-fluoro-nucleotide"
  modified_base 3..3: /mod_base="OTHER" /note="2'-OMe-nucleotide"
  modified_base 4..4: /mod_base="OTHER" /note="2'-fluoro-nucleotide"
  modified_base 5..5: /mod_base="OTHER" /note="2'-OMe-nucleotide"
  modified_base 6..6: /mod_base="OTHER" /note="2'-fluoro-nucleotide"
  modified_base 7..7: /mod_base="OTHER" /note="2'-OMe-nucleotide"
  modified_base 8..8: /mod_base="OTHER" /note="2'-fluoro-nucleotide"
  modified_base 9..9: /mod_base="OTHER" /note="2'-OMe-nucleotide"
  modified_base 10..10: /mod_base="OTHER" /note="2'-fluoro-nucleotide"
  modified_base 11..11: /mod_base="OTHER" /note="2'-OMe-nucleotide"
  modified_base 12..12: /mod_base="OTHER" /note="2'-fluoro-nucleotide"
  modified_base 13..13: /mod_base="OTHER" /note="2'-OMe-nucleotide"
  modified_base 14..14: /mod_base="OTHER" /note="2'-fluoro-nucleotide"
  modified_base 15..15: /mod_base="OTHER" /note="2'-OMe-nucleotide"
  modified_base 16..16: /mod_base="OTHER" /note="2'-fluoro-nucleotide"
  modified_base 17..17: /mod_base="OTHER" /note="2'-OMe-nucleotide"
  modified_base 18..18: /mod_base="OTHER" /note="2'-fluoro-nucleotide"
  modified_base 19..19: /mod_base="OTHER" /note="2'-OMe-nucleotide"
  modified_base 20..20: /mod_base="OTHER" /note="dT"
  modified_base 21..21: /mod_base="OTHER" /note="dT"
cuuggcuuggaagauagagtt

SEQ ID NO: 662 - DNA, 21 bp, Artificial Sequence
  Description of Artificial Sequence: Synthetic oligonucleotide
  Description of Combined DNA/RNA Molecule: Synthetic oligonucleotide
  N-term hydroxyl group
  C-term hydroxyl group
  modified_base 1..1: /mod_base="OTHER" /note="2'-fluoro-nucleotide"
  modified_base 2..2: /mod_base="OTHER" /note="2'-fluoro-nucleotide"
  modified_base 3..3: /mod_base="OTHER" /note="2'-OMe-nucleotide"
  modified_base 4..4: /mod_base="OTHER" /note="2'-fluoro-nucleotide"
  modified_base 5..5: /mod_base="OTHER" /note="2'-OMe-nucleotide"
  modified_base 6..6: /mod_base="OTHER" /note="2'-fluoro-nucleotide"
  modified_base 7..7: /mod_base="OTHER" /note="2'-OMe-nucleotide"
  modified_base 8..8: /mod_base="OTHER" /note="2'-fluoro-nucleotide"
  modified_base 9..9: /mod_base="OTHER" /note="2'-OMe-nucleotide"
  modified_base 10..10: /mod_base="OTHER" /note="2'-fluoro-nucleotide"
  modified_base 11..11: /mod_base="OTHER" /note="2'-OMe-nucleotide"
  modified_base 12..12: /mod_base="OTHER" /note="2'-fluoro-nucleotide"
  modified_base 13..13: /mod_base="OTHER" /note="2'-OMe-nucleotide"
  modified_base 14..14: /mod_base="OTHER" /note="2'-fluoro-nucleotide"
  modified_base 15..15: /mod_base="OTHER" /note="2'-OMe-nucleotide"
  modified_base 16..16: /mod_base="OTHER" /note="2'-fluoro-nucleotide"
  modified_base 17..17: /mod_base="OTHER" /note="2'-OMe-nucleotide"
  modified_base 18..18: /mod_base="OTHER" /note="2'-fluoro-nucleotide"
  modified_base 19..19: /mod_base="OTHER" /note="2'-OMe-nucleotide"
  modified_base 20..20: /mod_base="OTHER" /note="dT"
  modified_base 21..21: /mod_base="OTHER" /note="dT"
ucuuggcuuggaagauagatt

SEQ ID NO: 663 - DNA, 21 bp, Artificial Sequence
  Description of Artificial Sequence: Synthetic oligonucleotide
  Description of Combined DNA/RNA Molecule: Synthetic oligonucleotide
  N-term hydroxyl group
  C-term hydroxyl group
  modified_base 1..1: /mod_base="OTHER" /note="2'-fluoro-nucleotide"
  modified_base 2..2: /mod_base="OTHER" /note="2'-fluoro-nucleotide"
  modified_base 3..3: /mod_base="OTHER" /note="2'-OMe-nucleotide"
  modified_base 4..4: /mod_base="OTHER" /note="2'-fluoro-nucleotide"
  modified_base 5..5: /mod_base="OTHER" /note="2'-OMe-nucleotide"
  modified_base 6..6: /mod_base="OTHER" /note="2'-fluoro-nucleotide"
  modified_base 7..7: /mod_base="OTHER" /note="2'-OMe-nucleotide"
  modified_base 8..8: /mod_base="OTHER" /note="2'-fluoro-nucleotide"
  modified_base 9..9: /mod_base="OTHER" /note="2'-OMe-nucleotide"
  modified_base 10..10: /mod_base="OTHER" /note="2'-fluoro-nucleotide"
  modified_base 11..11: /mod_base="OTHER" /note="2'-OMe-nucleotide"
  modified_base 12..12: /mod_base="OTHER" /note="2'-fluoro-nucleotide"
  modified_base 13..13: /mod_base="OTHER" /note="2'-OMe-nucleotide"
  modified_base 14..14: /mod_base="OTHER" /note="2'-fluoro-nucleotide"
  modified_base 15..15: /mod_base="OTHER" /note="2'-OMe-nucleotide"
  modified_base 16..16: /mod_base="OTHER" /note="2'-fluoro-nucleotide"
  modified_base 17..17: /mod_base="OTHER" /note="2'-OMe-nucleotide"
  modified_base 18..18: /mod_base="OTHER" /note="2'-fluoro-nucleotide"
  modified_base 19..19: /mod_base="OTHER" /note="2'-OMe-nucleotide"
  modified_base 20..20: /mod_base="OTHER" /note="dT"
  modified_base 21..21: /mod_base="OTHER" /note="dT"
cucuuggcuuggaagauagtt

SEQ ID NO: 664 - DNA, 21 bp, Artificial Sequence
  Description of Artificial Sequence: Synthetic oligonucleotide
  Description of Combined DNA/RNA Molecule: Synthetic oligonucleotide
  N-term hydroxyl group
  C-term hydroxyl group
  modified_base 1..1: /mod_base="OTHER" /note="2'-fluoro-nucleotide"
  modified_base 2..2: /mod_base="OTHER" /note="2'-fluoro-nucleotide"
  modified_base 3..3: /mod_base="OTHER" /note="2'-OMe-nucleotide"
  modified_base 4..4: /mod_base="OTHER" /note="2'-fluoro-nucleotide"
  modified_base 5..5: /mod_base="OTHER" /note="2'-OMe-nucleotide"
  modified_base 6..6: /mod_base="OTHER" /note="2'-fluoro-nucleotide"
  modified_base 7..7: /mod_base="OTHER" /note="2'-OMe-nucleotide"
  modified_base 8..8: /mod_base="OTHER" /note="2'-fluoro-nucleotide"
  modified_base 9..9: /mod_base="OTHER" /note="2'-OMe-nucleotide"
  modified_base 10..10: /mod_base="OTHER" /note="2'-fluoro-nucleotide"
  modified_base 11..11: /mod_base="OTHER" /note="2'-OMe-nucleotide"
  modified_base 12..12: /mod_base="OTHER" /note="2'-fluoro-nucleotide"
  modified_base 13..13: /mod_base="OTHER" /note="2'-OMe-nucleotide"
  modified_base 14..14: /mod_base="OTHER" /note="2'-fluoro-nucleotide"
  modified_base 15..15: /mod_base="OTHER" /note="2'-OMe-nucleotide"
  modified_base 16..16: /mod_base="OTHER" /note="2'-fluoro-nucleotide"
  modified_base 17..17: /mod_base="OTHER" /note="2'-OMe-nucleotide"
  modified_base 18..18: /mod_base="OTHER" /note="2'-fluoro-nucleotide"
  modified_base 19..19: /mod_base="OTHER" /note="2'-OMe-nucleotide"
  modified_base 20..20: /mod_base="OTHER" /note="dT"
  modified_base 21..21: /mod_base="OTHER" /note="dT"
agaaagggaguaguucuugtt

SEQ ID NO: 665 - DNA, 21 bp, Artificial Sequence
  Description of Artificial Sequence: Synthetic oligonucleotide
  Description of Combined DNA/RNA Molecule: Synthetic oligonucleotide
  N-term hydroxyl group
  C-term hydroxyl group
  modified_base 1..1: /mod_base="OTHER" /note="2'-fluoro-nucleotide"
  modified_base 2..2: /mod_base="OTHER" /note="2'-fluoro-nucleotide"
  modified_base 3..3: /mod_base="OTHER" /note="2'-OMe-nucleotide"
  modified_base 4..4: /mod_base="OTHER" /note="2'-fluoro-nucleotide"
  modified_base 5..5: /mod_base="OTHER" /note="2'-OMe-nucleotide"
  modified_base 6..6: /mod_base="OTHER" /note="2'-fluoro-nucleotide"
  modified_base 7..7: /mod_base="OTHER" /note="2'-OMe-nucleotide"
  modified_base 8..8: /mod_base="OTHER" /note="2'-fluoro-nucleotide"
  modified_base 9..9: /mod_base="OTHER" /note="2'-OMe-nucleotide"
  modified_base 10..10: /mod_base="OTHER" /note="2'-fluoro-nucleotide"
  modified_base 11..11: /mod_base="OTHER" /note="2'-OMe-nucleotide"
  modified_base 12..12: /mod_base="OTHER" /note="2'-fluoro-nucleotide"
  modified_base 13..13: /mod_base="OTHER" /note="2'-OMe-nucleotide"
  modified_base 14..14: /mod_base="OTHER" /note="2'-fluoro-nucleotide"
  modified_base 15..15: /mod_base="OTHER" /note="2'-OMe-nucleotide"
  modified_base 16..16: /mod_base="OTHER" /note="2'-fluoro-nucleotide"
  modified_base 17..17: /mod_base="OTHER" /note="2'-OMe-nucleotide"
  modified_base 18..18: /mod_base="OTHER" /note="2'-fluoro-nucleotide"
  modified_base 19..19: /mod_base="OTHER" /note="2'-OMe-nucleotide"
  modified_base 20..20: /mod_base="OTHER" /note="dT"
  modified_base 21..21: /mod_base="OTHER" /note="dT"
gaagaaagggaguaguucutt

SEQ ID NO: 666 - DNA, 21 bp, Artificial Sequence
  Description of Artificial Sequence: Synthetic oligonucleotide
  Description of Combined DNA/RNA Molecule: Synthetic oligonucleotide
  N-term hydroxyl group
  C-term hydroxyl group
  modified_base 1..1: /mod_base="OTHER" /note="2'-fluoro-nucleotide"
  modified_base 2..2: /mod_base="OTHER" /note="2'-fluoro-nucleotide"
  modified_base 3..3: /mod_base="OTHER" /note="2'-OMe-nucleotide"
  modified_base 4..4: /mod_base="OTHER" /note="2'-fluoro-nucleotide"
  modified_base 5..5: /mod_base="OTHER" /note="2'-OMe-nucleotide"
  modified_base 6..6: /mod_base="OTHER" /note="2'-fluoro-nucleotide"
  modified_base 7..7: /mod_base="OTHER" /note="2'-OMe-nucleotide"
  modified_base 8..8: /mod_base="OTHER" /note="2'-fluoro-nucleotide"
  modified_base 9..9: /mod_base="OTHER" /note="2'-OMe-nucleotide"
  modified_base 10..10: /mod_base="OTHER" /note="2'-fluoro-nucleotide"
  modified_base 11..11: /mod_base="OTHER" /note="2'-OMe-nucleotide"
  modified_base 12..12: /mod_base="OTHER" /note="2'-fluoro-nucleotide"
  modified_base 13..13: /mod_base="OTHER" /note="2'-OMe-nucleotide"
  modified_base 14..14: /mod_base="OTHER" /note="2'-fluoro-nucleotide"
  modified_base 15..15: /mod_base="OTHER" /note="2'-OMe-nucleotide"
  modified_base 16..16: /mod_base="OTHER" /note="2'-fluoro-nucleotide"
  modified_base 17..17: /mod_base="OTHER" /note="2'-OMe-nucleotide"
  modified_base 18..18: /mod_base="OTHER" /note="2'-fluoro-nucleotide"
  modified_base 19..19: /mod_base="OTHER" /note="2'-OMe-nucleotide"
  modified_base 20..20: /mod_base="OTHER" /note="dT"
  modified_base 21..21: /mod_base="OTHER" /note="dT"
ugaagaaagggaguaguuctt

SEQ ID NO: 667 - DNA, 21 bp, Artificial Sequence
  Description of Artificial Sequence: Synthetic oligonucleotide
  Description of Combined DNA/RNA Molecule: Synthetic oligonucleotide
  N-term hydroxyl group
  C-term hydroxyl group
  modified_base 1..1: /mod_base="OTHER" /note="2'-fluoro-nucleotide"
  modified_base 2..2: /mod_base="OTHER" /note="2'-fluoro-nucleotide"
  modified_base 3..3: /mod_base="OTHER" /note="2'-OMe-nucleotide"
  modified_base 4..4: /mod_base="OTHER" /note="2'-fluoro-nucleotide"
  modified_base 5..5: /mod_base="OTHER" /note="2'-OMe-nucleotide"
  modified_base 6..6: /mod_base="OTHER" /note="2'-fluoro-nucleotide"
  modified_base 7..7: /mod_base="OTHER" /note="2'-OMe-nucleotide"
  modified_base 8..8: /mod_base="OTHER" /note="2'-fluoro-nucleotide"
  modified_base 9..9: /mod_base="OTHER" /note="2'-OMe-nucleotide"
  modified_base 10..10: /mod_base="OTHER" /note="2'-fluoro-nucleotide"
  modified_base 11..11: /mod_base="OTHER" /note="2'-OMe-nucleotide"
  modified_base 12..12: /mod_base="OTHER" /note="2'-fluoro-nucleotide"
  modified_base 13..13: /mod_base="OTHER" /note="2'-OMe-nucleotide"
  modified_base 14..14: /mod_base="OTHER" /note="2'-fluoro-nucleotide"
  modified_base 15..15: /mod_base="OTHER" /note="2'-OMe-nucleotide"
  modified_base 16..16: /mod_base="OTHER" /note="2'-fluoro-nucleotide"
  modified_base 17..17: /mod_base="OTHER" /note="2'-OMe-nucleotide"
  modified_base 18..18: /mod_base="OTHER" /note="2'-fluoro-nucleotide"
  modified_base 19..19: /mod_base="OTHER" /note="2'-OMe-nucleotide"
  modified_base 20..20: /mod_base="OTHER" /note="dT"
  modified_base 21..21: /mod_base="OTHER" /note="dT"
cugaagaaagggaguaguutt

SEQ ID NO: 668 - DNA, 21 bp, Artificial Sequence
  Description of Artificial Sequence: Synthetic oligonucleotide
  Description of Combined DNA/RNA Molecule: Synthetic oligonucleotide
  N-term hydroxyl group
  C-term hydroxyl group
  modified_base 1..1: /mod_base="OTHER" /note="2'-fluoro-nucleotide"
  modified_base 2..2: /mod_base="OTHER" /note="2'-fluoro-nucleotide"
  modified_base 3..3: /mod_base="OTHER" /note="2'-OMe-nucleotide"
  modified_base 4..4: /mod_base="OTHER" /note="2'-fluoro-nucleotide"
  modified_base 5..5: /mod_base="OTHER" /note="2'-OMe-nucleotide"
  modified_base 6..6: /mod_base="OTHER" /note="2'-fluoro-nucleotide"
  modified_base 7..7: /mod_base="OTHER" /note="2'-OMe-nucleotide"
  modified_base 8..8: /mod_base="OTHER" /note="2'-fluoro-nucleotide"
  modified_base 9..9: /mod_base="OTHER" /note="2'-OMe-nucleotide"
  modified_base 10..10: /mod_base="OTHER" /note="2'-fluoro-nucleotide"
  modified_base 11..11: /mod_base="OTHER" /note="2'-OMe-nucleotide"
  modified_base 12..12: /mod_base="OTHER" /note="2'-fluoro-nucleotide"
  modified_base 13..13: /mod_base="OTHER" /note="2'-OMe-nucleotide"
  modified_base 14..14: /mod_base="OTHER" /note="2'-fluoro-nucleotide"
  modified_base 15..15: /mod_base="OTHER" /note="2'-OMe-nucleotide"
  modified_base 16..16: /mod_base="OTHER" /note="2'-fluoro-nucleotide"
  modified_base 17..17: /mod_base="OTHER" /note="2'-OMe-nucleotide"
  modified_base 18..18: /mod_base="OTHER" /note="2'-fluoro-nucleotide"
  modified_base 19..19: /mod_base="OTHER" /note="2'-OMe-nucleotide"
  modified_base 20..20: /mod_base="OTHER" /note="dT"
  modified_base 21..21: /mod_base="OTHER" /note="dT"
gccaucauguuuuacauuutt

SEQ ID NO: 669 - DNA, 21 bp, Artificial Sequence
  Description of Artificial Sequence: Synthetic oligonucleotide
  Description of Combined DNA/RNA Molecule: Synthetic oligonucleotide
  N-term hydroxyl group
  C-term hydroxyl group
  modified_base 1..1: /mod_base="OTHER" /note="2'-fluoro-nucleotide"
  modified_base 2..2: /mod_base="OTHER" /note="2'-fluoro-nucleotide"
  modified_base 3..3: /mod_base="OTHER" /note="2'-OMe-nucleotide"
  modified_base 4..4: /mod_base="OTHER" /note="2'-fluoro-nucleotide"
  modified_base 5..5: /mod_base="OTHER" /note="2'-OMe-nucleotide"
  modified_base 6..6: /mod_base="OTHER" /note="2'-fluoro-nucleotide"
  modified_base 7..7: /mod_base="OTHER" /note="2'-OMe-nucleotide"
  modified_base 8..8: /mod_base="OTHER" /note="2'-fluoro-nucleotide"
  modified_base 9..9: /mod_base="OTHER" /note="2'-OMe-nucleotide"
  modified_base 10..10: /mod_base="OTHER" /note="2'-fluoro-nucleotide"
  modified_base 11..11: /mod_base="OTHER" /note="2'-OMe-nucleotide"
  modified_base 12..12: /mod_base="OTHER" /note="2'-fluoro-nucleotide"
  modified_base 13..13: /mod_base="OTHER" /note="2'-OMe-nucleotide"
  modified_base 14..14: /mod_base="OTHER" /note="2'-fluoro-nucleotide"
  modified_base 15..15: /mod_base="OTHER" /note="2'-OMe-nucleotide"
  modified_base 16..16: /mod_base="OTHER" /note="2'-fluoro-nucleotide"
  modified_base 17..17: /mod_base="OTHER" /note="2'-OMe-nucleotide"
  modified_base 18..18: /mod_base="OTHER" /note="2'-fluoro-nucleotide"
  modified_base 19..19: /mod_base="OTHER" /note="2'-OMe-nucleotide"
  modified_base 20..20: /mod_base="OTHER" /note="dT"
  modified_base 21..21: /mod_base="OTHER" /note="dT"
ugccaucauguuuuacauutt

SEQ ID NO: 670 - DNA, 21 bp, Artificial Sequence
  Description of Artificial Sequence: Synthetic oligonucleotide
  Description of Combined DNA/RNA Molecule: Synthetic oligonucleotide
  N-term hydroxyl group
  C-term hydroxyl group
  modified_base 1..1: /mod_base="OTHER" /note="2'-fluoro-nucleotide"
  modified_base 2..2: /mod_base="OTHER" /note="2'-fluoro-nucleotide"
  modified_base 3..3: /mod_base="OTHER" /note="2'-OMe-nucleotide"
  modified_base 4..4: /mod_base="OTHER" /note="2'-fluoro-nucleotide"
  modified_base 5..5: /mod_base="OTHER" /note="2'-OMe-nucleotide"
  modified_base 6..6: /mod_base="OTHER" /note="2'-fluoro-nucleotide"
  modified_base 7..7: /mod_base="OTHER" /note="2'-OMe-nucleotide"
  modified_base 8..8: /mod_base="OTHER" /note="2'-fluoro-nucleotide"
  modified_base 9..9: /mod_base="OTHER" /note="2'-OMe-nucleotide"
  modified_base 10..10: /mod_base="OTHER" /note="2'-fluoro-nucleotide"
  modified_base 11..11: /mod_base="OTHER" /note="2'-OMe-nucleotide"
  modified_base 12..12: /mod_base="OTHER" /note="2'-fluoro-nucleotide"
  modified_base 13..13: /mod_base="OTHER" /note="2'-OMe-nucleotide"
  modified_base 14..14: /mod_base="OTHER" /note="2'-fluoro-nucleotide"
  modified_base 15..15: /mod_base="OTHER" /note="2'-OMe-nucleotide"
  modified_base 16..16: /mod_base="OTHER" /note="2'-fluoro-nucleotide"
  modified_base 17..17: /mod_base="OTHER" /note="2'-OMe-nucleotide"
  modified_base 18..18: /mod_base="OTHER" /note="2'-fluoro-nucleotide"
  modified_base 19..19: /mod_base="OTHER" /note="2'-OMe-nucleotide"
  modified_base 20..20: /mod_base="OTHER" /note="dT"
  modified_base 21..21: /mod_base="OTHER" /note="dT"
ggaaugccaucauguuuuatt

SEQ ID NO: 671 - DNA, 21 bp, Artificial Sequence
  Description of Artificial Sequence: Synthetic oligonucleotide
  Description of Combined DNA/RNA Molecule: Synthetic oligonucleotide
  N-term hydroxyl group
  C-term hydroxyl group
  modified_base 1..1: /mod_base="OTHER" /note="2'-fluoro-nucleotide"
  modified_base 2..2: /mod_base="OTHER" /note="2'-fluoro-nucleotide"
  modified_base 3..3: /mod_base="OTHER" /note="2'-OMe-nucleotide"
  modified_base 4..4: /mod_base="OTHER" /note="2'-fluoro-nucleotide"
  modified_base 5..5: /mod_base="OTHER" /note="2'-OMe-nucleotide"
  modified_base 6..6: /mod_base="OTHER" /note="2'-fluoro-nucleotide"
  modified_base 7..7: /mod_base="OTHER" /note="2'-OMe-nucleotide"
  modified_base 8..8: /mod_base="OTHER" /note="2'-fluoro-nucleotide"
  modified_base 9..9: /mod_base="OTHER" /note="2'-OMe-nucleotide"
  modified_base 10..10: /mod_base="OTHER" /note="2'-fluoro-nucleotide"
  modified_base 11..11: /mod_base="OTHER" /note="2'-OMe-nucleotide"
  modified_base 12..12: /mod_base="OTHER" /note="2'-fluoro-nucleotide"
  modified_base 13..13: /mod_base="OTHER" /note="2'-OMe-nucleotide"
  modified_base 14..14: /mod_base="OTHER" /note="2'-fluoro-nucleotide"
  modified_base 15..15: /mod_base="OTHER" /note="2'-OMe-nucleotide"
  modified_base 16..16: /mod_base="OTHER" /note="2'-fluoro-nucleotide"
  modified_base 17..17: /mod_base="OTHER" /note="2'-OMe-nucleotide"
  modified_base 18..18: /mod_base="OTHER" /note="2'-fluoro-nucleotide"
  modified_base 19..19: /mod_base="OTHER" /note="2'-OMe-nucleotide"
  modified_base 20..20: /mod_base="OTHER" /note="dT"
  modified_base 21..21: /mod_base="OTHER" /note="dT"
aucacaguagacaugaaaatt

SEQ ID NO: 672 - DNA, 21 bp, Artificial Sequence
  Description of Artificial Sequence: Synthetic oligonucleotide
  Description of Combined DNA/RNA Molecule: Synthetic oligonucleotide
  N-term hydroxyl group
  C-term hydroxyl group
  modified_base 1..1: /mod_base="OTHER" /note="2'-fluoro-nucleotide"
  modified_base 2..2: /mod_base="OTHER" /note="2'-fluoro-nucleotide"
  modified_base 3..3: /mod_base="OTHER" /note="2'-OMe-nucleotide"
  modified_base 4..4: /mod_base="OTHER" /note="2'-fluoro-nucleotide"
  modified_base 5..5: /mod_base="OTHER" /note="2'-OMe-nucleotide"
  modified_base 6..6: /mod_base="OTHER" /note="2'-fluoro-nucleotide"
  modified_base 7..7: /mod_base="OTHER" /note="2'-OMe-nucleotide"
  modified_base 8..8: /mod_base="OTHER" /note="2'-fluoro-nucleotide"
  modified_base 9..9: /mod_base="OTHER" /note="2'-OMe-nucleotide"
  modified_base 10..10: /mod_base="OTHER" /note="2'-fluoro-nucleotide"
  modified_base 11..11: /mod_base="OTHER" /note="2'-OMe-nucleotide"
  modified_base 12..12: /mod_base="OTHER" /note="2'-fluoro-nucleotide"
  modified_base 13..13: /mod_base="OTHER" /note="2'-OMe-nucleotide"
  modified_base 14..14: /mod_base="OTHER" /note="2'-fluoro-nucleotide"
  modified_base 15..15: /mod_base="OTHER" /note="2'-OMe-nucleotide"
  modified_base 16..16: /mod_base="OTHER" /note="2'-fluoro-nucleotide"
  modified_base 17..17: /mod_base="OTHER" /note="2'-OMe-nucleotide"
  modified_base 18..18: /mod_base="OTHER" /note="2'-fluoro-nucleotide"
  modified_base 19..19: /mod_base="OTHER" /note="2'-OMe-nucleotide"
  modified_base 20..20: /mod_base="OTHER" /note="dT"
  modified_base 21..21: /mod_base="OTHER" /note="dT"
caucacaguagacaugaaatt

SEQ ID NO: 673 - DNA, 21 bp, Artificial Sequence
  Description of Artificial Sequence: Synthetic oligonucleotide
  Description of Combined DNA/RNA Molecule: Synthetic oligonucleotide
  N-term hydroxyl group
  C-term hydroxyl group
  modified_base 1..1: /mod_base="OTHER" /note="2'-fluoro-nucleotide"
  modified_base 2..2: /mod_base="OTHER" /note="2'-fluoro-nucleotide"
  modified_base 3..3: /mod_base="OTHER" /note="2'-OMe-nucleotide"
  modified_base 4..4: /mod_base="OTHER" /note="2'-fluoro-nucleotide"
  modified_base 5..5: /mod_base="OTHER" /note="2'-OMe-nucleotide"
  modified_base 6..6: /mod_base="OTHER" /note="2'-fluoro-nucleotide"
  modified_base 7..7: /mod_base="OTHER" /note="2'-OMe-nucleotide"
  modified_base 8..8: /mod_base="OTHER" /note="2'-fluoro-nucleotide"
  modified_base 9..9: /mod_base="OTHER" /note="2'-OMe-nucleotide"
  modified_base 10..10: /mod_base="OTHER" /note="2'-fluoro-nucleotide"
  modified_base 11..11: /mod_base="OTHER" /note="2'-OMe-nucleotide"
  modified_base 12..12: /mod_base="OTHER" /note="2'-fluoro-nucleotide"
  modified_base 13..13: /mod_base="OTHER" /note="2'-OMe-nucleotide"
  modified_base 14..14: /mod_base="OTHER" /note="2'-fluoro-nucleotide"
  modified_base 15..15: /mod_base="OTHER" /note="2'-OMe-nucleotide"
  modified_base 16..16: /mod_base="OTHER" /note="2'-fluoro-nucleotide"
  modified_base 17..17: /mod_base="OTHER" /note="2'-OMe-nucleotide"
  modified_base 18..18: /mod_base="OTHER" /note="2'-fluoro-nucleotide"
  modified_base 19..19: /mod_base="OTHER" /note="2'-OMe-nucleotide"
  modified_base 20..20: /mod_base="OTHER" /note="dT"
  modified_base 21..21: /mod_base="OTHER" /note="dT"
aacaucacaguagacaugatt

SEQ ID NO: 674 - DNA, 21 bp, Artificial Sequence
  Description of Artificial Sequence: Synthetic oligonucleotide
  Description of Combined DNA/RNA Molecule: Synthetic oligonucleotide
  N-term hydroxyl group
  C-term hydroxyl group
  modified_base 1..1: /mod_base="OTHER" /note="2'-fluoro-nucleotide"
  modified_base 2..2: /mod_base="OTHER" /note="2'-fluoro-nucleotide"
  modified_base 3..3: /mod_base="OTHER" /note="2'-OMe-nucleotide"
  modified_base 4..4: /mod_base="OTHER" /note="2'-fluoro-nucleotide"
  modified_base 5..5: /mod_base="OTHER" /note="2'-OMe-nucleotide"
  modified_base 6..6: /mod_base="OTHER" /note="2'-fluoro-nucleotide"
  modified_base 7..7: /mod_base="OTHER" /note="2'-OMe-nucleotide"
  modified_base 8..8: /mod_base="OTHER" /note="2'-fluoro-nucleotide"
  modified_base 9..9: /mod_base="OTHER" /note="2'-OMe-nucleotide"
  modified_base 10..10: /mod_base="OTHER" /note="2'-fluoro-nucleotide"
  modified_base 11..11: /mod_base="OTHER" /note="2'-OMe-nucleotide"
  modified_base 12..12: /mod_base="OTHER" /note="2'-fluoro-nucleotide"
  modified_base 13..13: /mod_base="OTHER" /note="2'-OMe-nucleotide"
  modified_base 14..14: /mod_base="OTHER" /note="2'-fluoro-nucleotide"
  modified_base 15..15: /mod_base="OTHER" /note="2'-OMe-nucleotide"
  modified_base 16..16: /mod_base="OTHER" /note="2'-fluoro-nucleotide"
  modified_base 17..17: /mod_base="OTHER" /note="2'-OMe-nucleotide"
  modified_base 18..18: /mod_base="OTHER" /note="2'-fluoro-nucleotide"
  modified_base 19..19: /mod_base="OTHER" /note="2'-OMe-nucleotide"
  modified_base 20..20: /mod_base="OTHER" /note="dT"
  modified_base 21..21: /mod_base="OTHER" /note="dT"
ccaacucaauucguaaaactt

SEQ ID NO: 675 - DNA, 21 bp, Artificial Sequence
  Description of Artificial Sequence: Synthetic oligonucleotide
  Description of Combined DNA/RNA Molecule: Synthetic oligonucleotide
  N-term hydroxyl group
  C-term hydroxyl group
  modified_base 1..1: /mod_base="OTHER" /note="2'-fluoro-nucleotide"
  modified_base 2..2: /mod_base="OTHER" /note="2'-fluoro-nucleotide"
  modified_base 3..3: /mod_base="OTHER" /note="2'-OMe-nucleotide"
  modified_base 4..4: /mod_base="OTHER" /note="2'-fluoro-nucleotide"
  modified_base 5..5: /mod_base="OTHER" /note="2'-OMe-nucleotide"
  modified_base 6..6: /mod_base="OTHER" /note="2'-fluoro-nucleotide"
  modified_base 7..7: /mod_base="OTHER" /note="2'-OMe-nucleotide"
  modified_base 8..8: /mod_base="OTHER" /note="2'-fluoro-nucleotide"
  modified_base 9..9: /mod_base="OTHER" /note="2'-OMe-nucleotide"
  modified_base 10..10: /mod_base="OTHER" /note="2'-fluoro-nucleotide"
  modified_base 11..11: /mod_base="OTHER" /note="2'-OMe-nucleotide"
  modified_base 12..12: /mod_base="OTHER" /note="2'-fluoro-nucleotide"
  modified_base 13..13: /mod_base="OTHER" /note="2'-OMe-nucleotide"
  modified_base 14..14: /mod_base="OTHER" /note="2'-fluoro-nucleotide"
  modified_base 15..15: /mod_base="OTHER" /note="2'-OMe-nucleotide"
  modified_base 16..16: /mod_base="OTHER" /note="2'-fluoro-nucleotide"
  modified_base 17..17: /mod_base="OTHER" /note="2'-OMe-nucleotide"
  modified_base 18..18: /mod_base="OTHER" /note="2'-fluoro-nucleotide"
  modified_base 19..19: /mod_base="OTHER" /note="2'-OMe-nucleotide"
  modified_base 20..20: /mod_base="OTHER" /note="dT"
  modified_base 21..21: /mod_base="OTHER" /note="dT"
uccaacucaauucguaaaatt

SEQ ID NO: 676 - DNA, 21 bp, Artificial Sequence
  Description of Artificial Sequence: Synthetic oligonucleotide
  Description of Combined DNA/RNA Molecule: Synthetic oligonucleotide
  N-term hydroxyl group
  C-term hydroxyl group
  modified_base 1..1: /mod_base="OTHER" /note="2'-fluoro-nucleotide"
  modified_base 2..2: /mod_base="OTHER" /note="2'-fluoro-nucleotide"
  modified_base 3..3: /mod_base="OTHER" /note="2'-OMe-nucleotide"
  modified_base 4..4: /mod_base="OTHER" /note="2'-fluoro-nucleotide"
  modified_base 5..5: /mod_base="OTHER" /note="2'-OMe-nucleotide"
  modified_base 6..6: /mod_base="OTHER" /note="2'-fluoro-nucleotide"
  modified_base 7..7: /mod_base="OTHER" /note="2'-OMe-nucleotide"
  modified_base 8..8: /mod_base="OTHER" /note="2'-fluoro-nucleotide"
  modified_base 9..9: /mod_base="OTHER" /note="2'-OMe-nucleotide"
  modified_base 10..10: /mod_base="OTHER" /note="2'-fluoro-nucleotide"
  modified_base 11..11: /mod_base="OTHER" /note="2'-OMe-nucleotide"
  modified_base 12..12: /mod_base="OTHER" /note="2'-fluoro-nucleotide"
  modified_base 13..13: /mod_base="OTHER" /note="2'-OMe-nucleotide"
  modified_base 14..14: /mod_base="OTHER" /note="2'-fluoro-nucleotide"
  modified_base 15..15: /mod_base="OTHER" /note="2'-OMe-nucleotide"
  modified_base 16..16: /mod_base="OTHER" /note="2'-fluoro-nucleotide"
  modified_base 17..17: /mod_base="OTHER" /note="2'-OMe-nucleotide"
  modified_base 18..18: /mod_base="OTHER" /note="2'-fluoro-nucleotide"
  modified_base 19..19: /mod_base="OTHER" /note="2'-OMe-nucleotide"
  modified_base 20..20: /mod_base="OTHER" /note="dT"
  modified_base 21..21: /mod_base="OTHER" /note="dT"
uagcguauaguugguuucgtt

SEQ ID NO: 677 - DNA, 21 bp, Artificial Sequence
  Description of Artificial Sequence: Synthetic oligonucleotide
  Description of Combined DNA/RNA Molecule: Synthetic oligonucleotide
  N-term hydroxyl group
  C-term hydroxyl group
  modified_base 1..1: /mod_base="OTHER" /note="2'-fluoro-nucleotide"
  modified_base 2..2: /mod_base="OTHER" /note="2'-fluoro-nucleotide"
  modified_base 3..3: /mod_base="OTHER" /note="2'-OMe-nucleotide"
  modified_base 4..4: /mod_base="OTHER" /note="2'-fluoro-nucleotide"
  modified_base 5..5: /mod_base="OTHER" /note="2'-OMe-nucleotide"
  modified_base 6..6: /mod_base="OTHER" /note="2'-fluoro-nucleotide"
  modified_base 7..7: /mod_base="OTHER" /note="2'-OMe-nucleotide"
  modified_base 8..8: /mod_base="OTHER" /note="2'-fluoro-nucleotide"
  modified_base 9..9: /mod_base="OTHER" /note="2'-OMe-nucleotide"
  modified_base 10..10: /mod_base="OTHER" /note="2'-fluoro-nucleotide"
  modified_base 11..11: /mod_base="OTHER" /note="2'-OMe-nucleotide"
  modified_base 12..12: /mod_base="OTHER" /note="2'-fluoro-nucleotide"
  modified_base 13..13: /mod_base="OTHER" /note="2'-OMe-nucleotide"
  modified_base 14..14: /mod_base="OTHER" /note="2'-fluoro-nucleotide"
  modified_base 15..15: /mod_base="OTHER" /note="2'-OMe-nucleotide"
  modified_base 16..16: /mod_base="OTHER" /note="2'-fluoro-nucleotide"
  modified_base 17..17: /mod_base="OTHER" /note="2'-OMe-nucleotide"
  modified_base 18..18: /mod_base="OTHER" /note="2'-fluoro-nucleotide"
  modified_base 19..19: /mod_base="OTHER" /note="2'-OMe-nucleotide"
  modified_base 20..20: /mod_base="OTHER" /note="dT"
  modified_base 21..21: /mod_base="OTHER" /note="dT"
guagcguauaguugguuuctt

SEQ ID NO: 678 - DNA, 21 bp, Artificial Sequence
  Description of Artificial Sequence: Synthetic oligonucleotide
  Description of Combined DNA/RNA Molecule: Synthetic oligonucleotide
  N-term hydroxyl group
  C-term hydroxyl group
  modified_base 1..1: /mod_base="OTHER" /note="2'-fluoro-nucleotide"
  modified_base 2..2: /mod_base="OTHER" /note="2'-fluoro-nucleotide"
  modified_base 3..3: /mod_base="OTHER" /note="2'-OMe-nucleotide"
  modified_base 4..4: /mod_base="OTHER" /note="2'-fluoro-nucleotide"
  modified_base 5..5: /mod_base="OTHER" /note="2'-OMe-nucleotide"
  modified_base 6..6: /mod_base="OTHER" /note="2'-fluoro-nucleotide"
  modified_base 7..7: /mod_base="OTHER" /note="2'-OMe-nucleotide"
  modified_base 8..8: /mod_base="OTHER" /note="2'-fluoro-nucleotide"
  modified_base 9..9: /mod_base="OTHER" /note="2'-OMe-nucleotide"
  modified_base 10..10: /mod_base="OTHER" /note="2'-fluoro-nucleotide"
  modified_base 11..11: /mod_base="OTHER" /note="2'-OMe-nucleotide"
  modified_base 12..12: /mod_base="OTHER" /note="2'-fluoro-nucleotide"
  modified_base 13..13: /mod_base="OTHER" /note="2'-OMe-nucleotide"
  modified_base 14..14: /mod_base="OTHER" /note="2'-fluoro-nucleotide"
  modified_base 15..15: /mod_base="OTHER" /note="2'-OMe-nucleotide"
  modified_base 16..16: /mod_base="OTHER" /note="2'-fluoro-nucleotide"
  modified_base 17..17: /mod_base="OTHER" /note="2'-OMe-nucleotide"
  modified_base 18..18: /mod_base="OTHER" /note="2'-fluoro-nucleotide"
  modified_base 19..19: /mod_base="OTHER" /note="2'-OMe-nucleotide"
  modified_base 20..20: /mod_base="OTHER" /note="dT"
  modified_base 21..21: /mod_base="OTHER" /note="dT"
uguagcguauaguugguuutt

SEQ ID NO: 679 - DNA, 21 bp, Artificial Sequence
  Description of Artificial Sequence: Synthetic oligonucleotide
  Description of Combined DNA/RNA Molecule: Synthetic oligonucleotide
  N-term hydroxyl group
  C-term hydroxyl group
  modified_base 1..1: /mod_base="OTHER" /note="2'-fluoro-nucleotide"
  modified_base 2..2: /mod_base="OTHER" /note="2'-fluoro-nucleotide"
  modified_base 3..3: /mod_base="OTHER" /note="2'-OMe-nucleotide"
  modified_base 4..4: /mod_base="OTHER" /note="2'-fluoro-nucleotide"
  modified_base 5..5: /mod_base="OTHER" /note="2'-OMe-nucleotide"
  modified_base 6..6: /mod_base="OTHER" /note="2'-fluoro-nucleotide"
  modified_base 7..7: /mod_base="OTHER" /note="2'-OMe-nucleotide"
  modified_base 8..8: /mod_base="OTHER" /note="2'-fluoro-nucleotide"
  modified_base 9..9: /mod_base="OTHER" /note="2'-OMe-nucleotide"
  modified_base 10..10: /mod_base="OTHER" /note="2'-fluoro-nucleotide"
  modified_base 11..11: /mod_base="OTHER" /note="2'-OMe-nucleotide"
  modified_base 12..12: /mod_base="OTHER" /note="2'-fluoro-nucleotide"
  modified_base 13..13: /mod_base="OTHER" /note="2'-OMe-nucleotide"
  modified_base 14..14: /mod_base="OTHER" /note="2'-fluoro-nucleotide"
  modified_base 15..15: /mod_base="OTHER" /note="2'-OMe-nucleotide"
  modified_base 16..16: /mod_base="OTHER" /note="2'-fluoro-nucleotide"
  modified_base 17..17: /mod_base="OTHER" /note="2'-OMe-nucleotide"
  modified_base 18..18: /mod_base="OTHER" /note="2'-fluoro-nucleotide"
  modified_base 19..19: /mod_base="OTHER" /note="2'-OMe-nucleotide"
  modified_base 20..20: /mod_base="OTHER" /note="dT"
  modified_base 21..21: /mod_base="OTHER" /note="dT"
auguagcguauaguugguutt

SEQ ID NO: 680 - DNA, 21 bp, Artificial Sequence
  Description of Artificial Sequence: Synthetic oligonucleotide
  Description of Combined DNA/RNA Molecule: Synthetic oligonucleotide
  N-term hydroxyl group
  C-term hydroxyl group
  modified_base 1..1: /mod_base="OTHER" /note="2'-fluoro-nucleotide"
  modified_base 2..2: /mod_base="OTHER" /note="2'-fluoro-nucleotide"
  modified_base 3..3: /mod_base="OTHER" /note="2'-OMe-nucleotide"
  modified_base 4..4: /mod_base="OTHER" /note="2'-fluoro-nucleotide"
  modified_base 5..5: /mod_base="OTHER" /note="2'-OMe-nucleotide"
  modified_base 6..6: /mod_base="OTHER" /note="2'-fluoro-nucleotide"
  modified_base 7..7: /mod_base="OTHER" /note="2'-OMe-nucleotide"
  modified_base 8..8: /mod_base="OTHER" /note="2'-fluoro-nucleotide"
  modified_base 9..9: /mod_base="OTHER" /note="2'-OMe-nucleotide"
  modified_base 10..10: /mod_base="OTHER" /note="2'-fluoro-nucleotide"
  modified_base 11..11: /mod_base="OTHER" /note="2'-OMe-nucleotide"
  modified_base 12..12: /mod_base="OTHER" /note="2'-fluoro-nucleotide"
  modified_base 13..13: /mod_base="OTHER" /note="2'-OMe-nucleotide"
  modified_base 14..14: /mod_base="OTHER" /note="2'-fluoro-nucleotide"
  modified_base 15..15: /mod_base="OTHER" /note="2'-OMe-nucleotide"
  modified_base 16..16: /mod_base="OTHER" /note="2'-fluoro-nucleotide"
  modified_base 17..17: /mod_base="OTHER" /note="2'-OMe-nucleotide"
  modified_base 18..18: /mod_base="OTHER" /note="2'-fluoro-nucleotide"
  modified_base 19..19: /mod_base="OTHER" /note="2'-OMe-nucleotide"
  modified_base 20..20: /mod_base="OTHER" /note="dT"
  modified_base 21..21: /mod_base="OTHER" /note="dT"
guguccuuuugcuuugugatt

SEQ ID NO: 681 - DNA, 21 bp, Artificial Sequence
  Description of Artificial Sequence: Synthetic oligonucleotide
  Description of Combined DNA/RNA Molecule: Synthetic oligonucleotide
  N-term hydroxyl group
  C-term hydroxyl group
  modified_base 1..1: /mod_base="OTHER" /note="2'-fluoro-nucleotide"
  modified_base 2..2: /mod_base="OTHER" /note="2'-fluoro-nucleotide"
  modified_base 3..3: /mod_base="OTHER" /note="2'-OMe-nucleotide"
  modified_base 4..4: /mod_base="OTHER" /note="2'-fluoro-nucleotide"
  modified_base 5..5: /mod_base="OTHER" /note="2'-OMe-nucleotide"
  modified_base 6..6: /mod_base="OTHER" /note="2'-fluoro-nucleotide"
  modified_base 7..7: /mod_base="OTHER" /note="2'-OMe-nucleotide"
  modified_base 8..8: /mod_base="OTHER" /note="2'-fluoro-nucleotide"
  modified_base 9..9: /mod_base="OTHER" /note="2'-OMe-nucleotide"
  modified_base 10..10: /mod_base="OTHER" /note="2'-fluoro-nucleotide"
  modified_base 11..11: /mod_base="OTHER" /note="2'-OMe-nucleotide"
  modified_base 12..12: /mod_base="OTHER" /note="2'-fluoro-nucleotide"
  modified_base 13..13: /mod_base="OTHER" /note="2'-OMe-nucleotide"
  modified_base 14..14: /mod_base="OTHER" /note="2'-fluoro-nucleotide"
  modified_base 15..15: /mod_base="OTHER" /note="2'-OMe-nucleotide"
  modified_base 16..16: /mod_base="OTHER" /note="2'-fluoro-nucleotide"
  modified_base 17..17: /mod_base="OTHER" /note="2'-OMe-nucleotide"
  modified_base 18..18: /mod_base="OTHER" /note="2'-fluoro-nucleotide"
  modified_base 19..19: /mod_base="OTHER" /note="2'-OMe-nucleotide"
  modified_base 20..20: /mod_base="OTHER" /note="dT"
  modified_base 21..21: /mod_base="OTHER" /note="dT"
caccagccuccugaauaactt

SEQ ID NO: 682 - DNA, 21 bp, Artificial Sequence
  Description of Artificial Sequence: Synthetic oligonucleotide
  Description of Combined DNA/RNA Molecule: Synthetic oligonucleotide
  N-term hydroxyl group
  C-term hydroxyl group
  modified_base 1..1: /mod_base="OTHER" /note="2'-fluoro-nucleotide"
  modified_base 2..2: /mod_base="OTHER" /note="2'-fluoro-nucleotide"
  modified_base 3..3: /mod_base="OTHER" /note="2'-OMe-nucleotide"
  modified_base 4..4: /mod_base="OTHER" /note="2'-fluoro-nucleotide"
  modified_base 5..5: /mod_base="OTHER" /note="2'-OMe-nucleotide"
  modified_base 6..6: /mod_base="OTHER" /note="2'-fluoro-nucleotide"
  modified_base 7..7: /mod_base="OTHER" /note="2'-OMe-nucleotide"
  modified_base 8..8: /mod_base="OTHER" /note="2'-fluoro-nucleotide"
  modified_base 9..9: /mod_base="OTHER" /note="2'-OMe-nucleotide"
  modified_base 10..10: /mod_base="OTHER" /note="2'-fluoro-nucleotide"
  modified_base 11..11: /mod_base="OTHER" /note="2'-OMe-nucleotide"
  modified_base 12..12: /mod_base="OTHER" /note="2'-fluoro-nucleotide"
  modified_base 13..13: /mod_base="OTHER" /note="2'-OMe-nucleotide"
  modified_base 14..14: /mod_base="OTHER" /note="2'-fluoro-nucleotide"
  modified_base 15..15: /mod_base="OTHER" /note="2'-OMe-nucleotide"
  modified_base 16..16: /mod_base="OTHER" /note="2'-fluoro-nucleotide"
  modified_base 17..17: /mod_base="OTHER" /note="2'-OMe-nucleotide"
  modified_base 18..18: /mod_base="OTHER" /note="2'-fluoro-nucleotide"
  modified_base 19..19: /mod_base="OTHER" /note="2'-OMe-nucleotide"
  modified_base 20..20: /mod_base="OTHER" /note="dT"
  modified_base 21..21: /mod_base="OTHER" /note="dT"
ccaccagccuccugaauaatt

SEQ ID NO: 683 - DNA, 21 bp, Artificial Sequence
  Description of Artificial Sequence: Synthetic oligonucleotide
  Description of Combined DNA/RNA Molecule: Synthetic oligonucleotide
  N-term hydroxyl group
  C-term hydroxyl group
  modified_base 1..1: /mod_base="OTHER" /note="2'-fluoro-nucleotide"
  modified_base 2..2: /mod_base="OTHER" /note="2'-fluoro-nucleotide"
  modified_base 3..3: /mod_base="OTHER" /note="2'-OMe-nucleotide"
  modified_base 4..4: /mod_base="OTHER" /note="2'-fluoro-nucleotide"
  modified_base 5..5: /mod_base="OTHER" /note="2'-OMe-nucleotide"
  modified_base 6..6: /mod_base="OTHER" /note="2'-fluoro-nucleotide"
  modified_base 7..7: /mod_base="OTHER" /note="2'-OMe-nucleotide"
  modified_base 8..8: /mod_base="OTHER" /note="2'-fluoro-nucleotide"
  modified_base 9..9: /mod_base="OTHER" /note="2'-OMe-nucleotide"
  modified_base 10..10: /mod_base="OTHER" /note="2'-fluoro-nucleotide"
  modified_base 11..11: /mod_base="OTHER" /note="2'-OMe-nucleotide"
  modified_base 12..12: /mod_base="OTHER" /note="2'-fluoro-nucleotide"
  modified_base 13..13: /mod_base="OTHER" /note="2'-OMe-nucleotide"
  modified_base 14..14: /mod_base="OTHER" /note="2'-fluoro-nucleotide"
  modified_base 15..15: /mod_base="OTHER" /note="2'-OMe-nucleotide"
  modified_base 16..16: /mod_base="OTHER" /note="2'-fluoro-nucleotide"
  modified_base 17..17: /mod_base="OTHER" /note="2'-OMe-nucleotide"
  modified_base 18..18: /mod_base="OTHER" /note="2'-fluoro-nucleotide"
  modified_base 19..19: /mod_base="OTHER" /note="2'-OMe-nucleotide"
  modified_base 20..20: /mod_base="OTHER" /note="dT"
  modified_base 21..21: /mod_base="OTHER" /note="dT"
accaccagccuccugaauatt

SEQ ID NO: 684 - DNA, 21 bp, Artificial Sequence
  Description of Artificial Sequence: Synthetic oligonucleotide
  Description of Combined DNA/RNA Molecule: Synthetic oligonucleotide
  N-term hydroxyl group
  C-term hydroxyl group
  modified_base 1..1: /mod_base="OTHER" /note="2'-fluoro-nucleotide"
  modified_base 2..2: /mod_base="OTHER" /note="2'-fluoro-nucleotide"
  modified_base 3..3: /mod_base="OTHER" /note="2'-OMe-nucleotide"
  modified_base 4..4: /mod_base="OTHER" /note="2'-fluoro-nucleotide"
  modified_base 5..5: /mod_base="OTHER" /note="2'-OMe-nucleotide"
  modified_base 6..6: /mod_base="OTHER" /note="2'-fluoro-nucleotide"
  modified_base 7..7: /mod_base="OTHER" /note="2'-OMe-nucleotide"
  modified_base 8..8: /mod_base="OTHER" /note="2'-fluoro-nucleotide"
  modified_base 9..9: /mod_base="OTHER" /note="2'-OMe-nucleotide"
  modified_base 10..10: /mod_base="OTHER" /note="2'-fluoro-nucleotide"
  modified_base 11..11: /mod_base="OTHER" /note="2'-OMe-nucleotide"
  modified_base 12..12: /mod_base="OTHER" /note="2'-fluoro-nucleotide"
  modified_base 13..13: /mod_base="OTHER" /note="2'-OMe-nucleotide"
  modified_base 14..14: /mod_base="OTHER" /note="2'-fluoro-nucleotide"
  modified_base 15..15: /mod_base="OTHER" /note="2'-OMe-nucleotide"
  modified_base 16..16: /mod_base="OTHER" /note="2'-fluoro-nucleotide"
  modified_base 17..17: /mod_base="OTHER" /note="2'-OMe-nucleotide"
  modified_base 18..18: /mod_base="OTHER" /note="2'-fluoro-nucleotide"
  modified_base 19..19: /mod_base="OTHER" /note="2'-OMe-nucleotide"
  modified_base 20..20: /mod_base="OTHER" /note="dT"
  modified_base 21..21: /mod_base="OTHER" /note="dT"
cacauuaacuuggaaugagtt

SEQ ID NO: 685 - DNA, 21 bp, Artificial Sequence
  Description of Artificial Sequence: Synthetic oligonucleotide
  Description of Combined DNA/RNA Molecule: Synthetic oligonucleotide
  N-term hydroxyl group
  C-term hydroxyl group
  modified_base 1..1: /mod_base="OTHER" /note="2'-fluoro-nucleotide"
  modified_base 2..2: /mod_base="OTHER" /note="2'-fluoro-nucleotide"
  modified_base 3..3: /mod_base="OTHER" /note="2'-OMe-nucleotide"
  modified_base 4..4: /mod_base="OTHER" /note="2'-fluoro-nucleotide"
  modified_base 5..5: /mod_base="OTHER" /note="2'-OMe-nucleotide"
  modified_base 6..6: /mod_base="OTHER" /note="2'-fluoro-nucleotide"
  modified_base 7..7: /mod_base="OTHER" /note="2'-OMe-nucleotide"
  modified_base 8..8: /mod_base="OTHER" /note="2'-fluoro-nucleotide"
  modified_base 9..9: /mod_base="OTHER" /note="2'-OMe-nucleotide"
  modified_base 10..10: /mod_base="OTHER" /note="2'-fluoro-nucleotide"
  modified_base 11..11: /mod_base="OTHER" /note="2'-OMe-nucleotide"
  modified_base 12..12: /mod_base="OTHER" /note="2'-fluoro-nucleotide"
  modified_base 13..13: /mod_base="OTHER" /note="2'-OMe-nucleotide"
  modified_base 14..14: /mod_base="OTHER" /note="2'-fluoro-nucleotide"
  modified_base 15..15: /mod_base="OTHER" /note="2'-OMe-nucleotide"
  modified_base 16..16: /mod_base="OTHER" /note="2'-fluoro-nucleotide"
  modified_base 17..17: /mod_base="OTHER" /note="2'-OMe-nucleotide"
  modified_base 18..18: /mod_base="OTHER" /note="2'-fluoro-nucleotide"
  modified_base 19..19: /mod_base="OTHER" /note="2'-OMe-nucleotide"
  modified_base 20..20: /mod_base="OTHER" /note="dT"
  modified_base 21..21: /mod_base="OTHER" /note="dT"
ccacauuaacuuggaaugatt

SEQ ID NO: 686 - DNA, 21 bp, Artificial Sequence
  Description of Artificial Sequence: Synthetic oligonucleotide
  Description of Combined DNA/RNA Molecule: Synthetic oligonucleotide
  N-term hydroxyl group
  C-term hydroxyl group
  modified_base 1..1: /mod_base="OTHER" /note="2'-fluoro-nucleotide"
  modified_base 2..2: /mod_base="OTHER" /note="2'-fluoro-nucleotide"
  modified_base 3..3: /mod_base="OTHER" /note="2'-OMe-nucleotide"
  modified_base 4..4: /mod_base="OTHER" /note="2'-fluoro-nucleotide"
  modified_base 5..5: /mod_base="OTHER" /note="2'-OMe-nucleotide"
  modified_base 6..6: /mod_base="OTHER" /note="2'-fluoro-nucleotide"
  modified_base 7..7: /mod_base="OTHER" /note="2'-OMe-nucleotide"
  modified_base 8..8: /mod_base="OTHER" /note="2'-fluoro-nucleotide"
  modified_base 9..9: /mod_base="OTHER" /note="2'-OMe-nucleotide"
  modified_base 10..10: /mod_base="OTHER" /note="2'-fluoro-nucleotide"
  modified_base 11..11: /mod_base="OTHER" /note="2'-OMe-nucleotide"
  modified_base 12..12: /mod_base="OTHER" /note="2'-fluoro-nucleotide"
  modified_base 13..13: /mod_base="OTHER" /note="2'-OMe-nucleotide"
  modified_base 14..14: /mod_base="OTHER" /note="2'-fluoro-nucleotide"
  modified_base 15..15: /mod_base="OTHER" /note="2'-OMe-nucleotide"
  modified_base 16..16: /mod_base="OTHER" /note="2'-fluoro-nucleotide"
  modified_base 17..17: /mod_base="OTHER" /note="2'-OMe-nucleotide"
  modified_base 18..18: /mod_base="OTHER" /note="2'-fluoro-nucleotide"
  modified_base 19..19: /mod_base="OTHER" /note="2'-OMe-nucleotide"
  modified_base 20..20: /mod_base="OTHER" /note="dT"
  modified_base 21..21: /mod_base="OTHER" /note="dT"
accacauuaacuuggaaugtt

SEQ ID NO: 687 - DNA, 21 bp, Artificial Sequence
  Description of Artificial Sequence: Synthetic oligonucleotide
  Description of Combined DNA/RNA Molecule: Synthetic oligonucleotide
  N-term hydroxyl group
  C-term hydroxyl group
  modified_base 1..1: /mod_base="OTHER" /note="2'-fluoro-nucleotide"
  modified_base 2..2: /mod_base="OTHER" /note="2'-fluoro-nucleotide"
  modified_base 3..3: /mod_base="OTHER" /note="2'-OMe-nucleotide"
  modified_base 4..4: /mod_base="OTHER" /note="2'-fluoro-nucleotide"
  modified_base 5..5: /mod_base="OTHER" /note="2'-OMe-nucleotide"
  modified_base 6..6: /mod_base="OTHER" /note="2'-fluoro-nucleotide"
  modified_base 7..7: /mod_base="OTHER" /note="2'-OMe-nucleotide"
  modified_base 8..8: /mod_base="OTHER" /note="2'-fluoro-nucleotide"
  modified_base 9..9: /mod_base="OTHER" /note="2'-OMe-nucleotide"
  modified_base 10..10: /mod_base="OTHER" /note="2'-fluoro-nucleotide"
  modified_base 11..11: /mod_base="OTHER" /note="2'-OMe-nucleotide"
  modified_base 12..12: /mod_base="OTHER" /note="2'-fluoro-nucleotide"
  modified_base 13..13: /mod_base="OTHER" /note="2'-OMe-nucleotide"
  modified_base 14..14: /mod_base="OTHER" /note="2'-fluoro-nucleotide"
  modified_base 15..15: /mod_base="OTHER" /note="2'-OMe-nucleotide"
  modified_base 16..16: /mod_base="OTHER" /note="2'-fluoro-nucleotide"
  modified_base 17..17: /mod_base="OTHER" /note="2'-OMe-nucleotide"
  modified_base 18..18: /mod_base="OTHER" /note="2'-fluoro-nucleotide"
  modified_base 19..19: /mod_base="OTHER" /note="2'-OMe-nucleotide"
  modified_base 20..20: /mod_base="OTHER" /note="dT"
  modified_base 21..21: /mod_base="OTHER" /note="dT"
auuuaauaccagauuauuatt

SEQ ID NO: 688 - DNA, 21 bp, Artificial Sequence
  Description of Artificial Sequence: Synthetic oligonucleotide
  Description of Combined DNA/RNA Molecule: Synthetic oligonucleotide
  N-term hydroxyl group
  C-term hydroxyl group
  modified_base 1..1: /mod_base="OTHER" /note="2'-fluoro-nucleotide"
  modified_base 2..2: /mod_base="OTHER" /note="2'-fluoro-nucleotide"
  modified_base 3..3: /mod_base="OTHER" /note="2'-OMe-nucleotide"
  modified_base 4..4: /mod_base="OTHER" /note="2'-fluoro-nucleotide"
  modified_base 5..5: /mod_base="OTHER" /note="2'-OMe-nucleotide"
  modified_base 6..6: /mod_base="OTHER" /note="2'-fluoro-nucleotide"
  modified_base 7..7: /mod_base="OTHER" /note="2'-OMe-nucleotide"
  modified_base 8..8: /mod_base="OTHER" /note="2'-fluoro-nucleotide"
  modified_base 9..9: /mod_base="OTHER" /note="2'-OMe-nucleotide"
  modified_base 10..10: /mod_base="OTHER" /note="2'-fluoro-nucleotide"
  modified_base 11..11: /mod_base="OTHER" /note="2'-OMe-nucleotide"
  modified_base 12..12: /mod_base="OTHER" /note="2'-fluoro-nucleotide"
  modified_base 13..13: /mod_base="OTHER" /note="2'-OMe-nucleotide"
  modified_base 14..14: /mod_base="OTHER" /note="2'-fluoro-nucleotide"
  modified_base 15..15: /mod_base="OTHER" /note="2'-OMe-nucleotide"
  modified_base 16..16: /mod_base="OTHER" /note="2'-fluoro-nucleotide"
  modified_base 17..17: /mod_base="OTHER" /note="2'-OMe-nucleotide"
  modified_base 18..18: /mod_base="OTHER" /note="2'-fluoro-nucleotide"
  modified_base 19..19: /mod_base="OTHER" /note="2'-OMe-nucleotide"
  modified_base 20..20: /mod_base="OTHER" /note="dT"
  modified_base 21..21: /mod_base="OTHER" /note="dT"
gauuuaauaccagauuauutt

SEQ ID NO: 689 - DNA, 21 bp, Artificial Sequence
  Description of Artificial Sequence: Synthetic oligonucleotide
  Description of Combined DNA/RNA Molecule: Synthetic oligonucleotide
  N-term hydroxyl group
  C-term hydroxyl group
  modified_base 1..1: /mod_base="OTHER" /note="2'-fluoro-nucleotide"
  modified_base 2..2: /mod_base="OTHER" /note="2'-fluoro-nucleotide"
  modified_base 3..3: /mod_base="OTHER" /note="2'-OMe-nucleotide"
  modified_base 4..4: /mod_base="OTHER" /note="2'-fluoro-nucleotide"
  modified_base 5..5: /mod_base="OTHER" /note="2'-OMe-nucleotide"
  modified_base 6..6: /mod_base="OTHER" /note="2'-fluoro-nucleotide"
  modified_base 7..7: /mod_base="OTHER" /note="2'-OMe-nucleotide"
  modified_base 8..8: /mod_base="OTHER" /note="2'-fluoro-nucleotide"
  modified_base 9..9: /mod_base="OTHER" /note="2'-OMe-nucleotide"
  modified_base 10..10: /mod_base="OTHER" /note="2'-fluoro-nucleotide"
  modified_base 11..11: /mod_base="OTHER" /note="2'-OMe-nucleotide"
  modified_base 12..12: /mod_base="OTHER" /note="2'-fluoro-nucleotide"
  modified_base 13..13: /mod_base="OTHER" /note="2'-OMe-nucleotide"
  modified_base 14..14: /mod_base="OTHER" /note="2'-fluoro-nucleotide"
  modified_base 15..15: /mod_base="OTHER" /note="2'-OMe-nucleotide"
  modified_base 16..16: /mod_base="OTHER" /note="2'-fluoro-nucleotide"
  modified_base 17..17: /mod_base="OTHER" /note="2'-OMe-nucleotide"
  modified_base 18..18: /mod_base="OTHER" /note="2'-fluoro-nucleotide"
  modified_base 19..19: /mod_base="OTHER" /note="2'-OMe-nucleotide"
  modified_base 20..20: /mod_base="OTHER" /note="dT"
  modified_base 21..21: /mod_base="OTHER" /note="dT"
aggauuuaauaccagauuatt

SEQ ID NO: 690 - DNA, 21 bp, Artificial Sequence
  Description of Artificial Sequence: Synthetic oligonucleotide
  Description of Combined DNA/RNA Molecule: Synthetic oligonucleotide
  N-term hydroxyl group
  C-term hydroxyl group
  modified_base 1..1: /mod_base="OTHER" /note="2'-fluoro-nucleotide"
  modified_base 2..2: /mod_base="OTHER" /note="2'-fluoro-nucleotide"
  modified_base 3..3: /mod_base="OTHER" /note="2'-OMe-nucleotide"
  modified_base 4..4: /mod_base="OTHER" /note="2'-fluoro-nucleotide"
  modified_base 5..5: /mod_base="OTHER" /note="2'-OMe-nucleotide"
  modified_base 6..6: /mod_base="OTHER" /note="2'-fluoro-nucleotide"
  modified_base 7..7: /mod_base="OTHER" /note="2'-OMe-nucleotide"
  modified_base 8..8: /mod_base="OTHER" /note="2'-fluoro-nucleotide"
  modified_base 9..9: /mod_base="OTHER" /note="2'-OMe-nucleotide"
  modified_base 10..10: /mod_base="OTHER" /note="2'-fluoro-nucleotide"
  modified_base 11..11: /mod_base="OTHER" /note="2'-OMe-nucleotide"
  modified_base 12..12: /mod_base="OTHER" /note="2'-fluoro-nucleotide"
  modified_base 13..13: /mod_base="OTHER" /note="2'-OMe-nucleotide"
  modified_base 14..14: /mod_base="OTHER" /note="2'-fluoro-nucleotide"
  modified_base 15..15: /mod_base="OTHER" /note="2'-OMe-nucleotide"
  modified_base 16..16: /mod_base="OTHER" /note="2'-fluoro-nucleotide"
  modified_base 17..17: /mod_base="OTHER" /note="2'-OMe-nucleotide"
  modified_base 18..18: /mod_base="OTHER" /note="2'-fluoro-nucleotide"
  modified_base 19..19: /mod_base="OTHER" /note="2'-OMe-nucleotide"
  modified_base 20..20: /mod_base="OTHER" /note="dT"
  modified_base 21..21: /mod_base="OTHER" /note="dT"
uaaggauuuaauaccagautt

SEQ ID NO: 691 - DNA, 21 bp, Artificial Sequence
  Description of Artificial Sequence: Synthetic oligonucleotide
  Description of Combined DNA/RNA Molecule: Synthetic oligonucleotide
  N-term hydroxyl group
  C-term hydroxyl group
  modified_base 1..1: /mod_base="OTHER" /note="2'-fluoro-nucleotide"
  modified_base 2..2: /mod_base="OTHER" /note="2'-fluoro-nucleotide"
  modified_base 3..3: /mod_base="OTHER" /note="2'-OMe-nucleotide"
  modified_base 4..4: /mod_base="OTHER" /note="2'-fluoro-nucleotide"
  modified_base 5..5: /mod_base="OTHER" /note="2'-OMe-nucleotide"
  modified_base 6..6: /mod_base="OTHER" /note="2'-fluoro-nucleotide"
  modified_base 7..7: /mod_base="OTHER" /note="2'-OMe-nucleotide"
  modified_base 8..8: /mod_base="OTHER" /note="2'-fluoro-nucleotide"
  modified_base 9..9: /mod_base="OTHER" /note="2'-OMe-nucleotide"
  modified_base 10..10: /mod_base="OTHER" /note="2'-fluoro-nucleotide"
  modified_base 11..11: /mod_base="OTHER" /note="2'-OMe-nucleotide"
  modified_base 12..12: /mod_base="OTHER" /note="2'-fluoro-nucleotide"
  modified_base 13..13: /mod_base="OTHER" /note="2'-OMe-nucleotide"
  modified_base 14..14: /mod_base="OTHER" /note="2'-fluoro-nucleotide"
  modified_base 15..15: /mod_base="OTHER" /note="2'-OMe-nucleotide"
  modified_base 16..16: /mod_base="OTHER" /note="2'-fluoro-nucleotide"
  modified_base 17..17: /mod_base="OTHER" /note="2'-OMe-nucleotide"
  modified_base 18..18: /mod_base="OTHER" /note="2'-fluoro-nucleotide"
  modified_base 19..19: /mod_base="OTHER" /note="2'-OMe-nucleotide"
  modified_base 20..20: /mod_base="OTHER" /note="dT"
  modified_base 21..21: /mod_base="OTHER" /note="dT"
cuuaaggauuuaauaccagtt

SEQ ID NO: 692 - DNA, 21 bp, Artificial Sequence
  Description of Artificial Sequence: Synthetic oligonucleotide
  Description of Combined DNA/RNA Molecule: Synthetic oligonucleotide
  N-term hydroxyl group
  C-term hydroxyl group
  modified_base 1..1: /mod_base="OTHER" /note="2'-fluoro-nucleotide"
  modified_base 2..2: /mod_base="OTHER" /note="2'-fluoro-nucleotide"
  modified_base 3..3: /mod_base="OTHER" /note="2'-OMe-nucleotide"
  modified_base 4..4: /mod_base="OTHER" /note="2'-fluoro-nucleotide"
  modified_base 5..5: /mod_base="OTHER" /note="2'-OMe-nucleotide"
  modified_base 6..6: /mod_base="OTHER" /note="2'-fluoro-nucleotide"
  modified_base 7..7: /mod_base="OTHER" /note="2'-OMe-nucleotide"
  modified_base 8..8: /mod_base="OTHER" /note="2'-fluoro-nucleotide"
  modified_base 9..9: /mod_base="OTHER" /note="2'-OMe-nucleotide"
  modified_base 10..10: /mod_base="OTHER" /note="2'-fluoro-nucleotide"
  modified_base 11..11: /mod_base="OTHER" /note="2'-OMe-nucleotide"
  modified_base 12..12: /mod_base="OTHER" /note="2'-fluoro-nucleotide"
  modified_base 13..13: /mod_base="OTHER" /note="2'-OMe-nucleotide"
  modified_base 14..14: /mod_base="OTHER" /note="2'-fluoro-nucleotide"
  modified_base 15..15: /mod_base="OTHER" /note="2'-OMe-nucleotide"
  modified_base 16..16: /mod_base="OTHER" /note="2'-fluoro-nucleotide"
  modified_base 17..17: /mod_base="OTHER" /note="2'-OMe-nucleotide"
  modified_base 18..18: /mod_base="OTHER" /note="2'-fluoro-nucleotide"
  modified_base 19..19: /mod_base="OTHER" /note="2'-OMe-nucleotide"
  modified_base 20..20: /mod_base="OTHER" /note="dT"
  modified_base 21..21: /mod_base="OTHER" /note="dT"
ucuuaaggauuuaauaccatt

SEQ ID NO: 693 - DNA, 21 bp, Artificial Sequence
  Description of Artificial Sequence: Synthetic oligonucleotide
  Description of Combined DNA/RNA Molecule: Synthetic oligonucleotide
  N-term hydroxyl group
  C-term hydroxyl group
  modified_base 1..1: /mod_base="OTHER" /note="2'-fluoro-nucleotide"
  modified_base 2..2: /mod_base="OTHER" /note="2'-fluoro-nucleotide"
  modified_base 3..3: /mod_base="OTHER" /note="2'-OMe-nucleotide"
  modified_base 4..4: /mod_base="OTHER" /note="2'-fluoro-nucleotide"
  modified_base 5..5: /mod_base="OTHER" /note="2'-OMe-nucleotide"
  modified_base 6..6: /mod_base="OTHER" /note="2'-fluoro-nucleotide"
  modified_base 7..7: /mod_base="OTHER" /note="2'-OMe-nucleotide"
  modified_base 8..8: /mod_base="OTHER" /note="2'-fluoro-nucleotide"
  modified_base 9..9: /mod_base="OTHER" /note="2'-OMe-nucleotide"
  modified_base 10..10: /mod_base="OTHER" /note="2'-fluoro-nucleotide"
  modified_base 11..11: /mod_base="OTHER" /note="2'-OMe-nucleotide"
  modified_base 12..12: /mod_base="OTHER" /note="2'-fluoro-nucleotide"
  modified_base 13..13: /mod_base="OTHER" /note="2'-OMe-nucleotide"
  modified_base 14..14: /mod_base="OTHER" /note="2'-fluoro-nucleotide"
  modified_base 15..15: /mod_base="OTHER" /note="2'-OMe-nucleotide"
  modified_base 16..16: /mod_base="OTHER" /note="2'-fluoro-nucleotide"
  modified_base 17..17: /mod_base="OTHER" /note="2'-OMe-nucleotide"
  modified_base 18..18: /mod_base="OTHER" /note="2'-fluoro-nucleotide"
  modified_base 19..19: /mod_base="OTHER" /note="2'-OMe-nucleotide"
  modified_base 20..20: /mod_base="OTHER" /note="dT"
  modified_base 21..21: /mod_base="OTHER" /note="dT"
ucucuuaaggauuuaauactt

SEQ ID NO: 694 - DNA, 21 bp, Artificial Sequence
  Description of Artificial Sequence: Synthetic oligonucleotide
  Description of Combined DNA/RNA Molecule: Synthetic oligonucleotide
  N-term hydroxyl group
  C-term hydroxyl group
  modified_base 1..1: /mod_base="OTHER" /note="2'-fluoro-nucleotide"
  modified_base 2..2: /mod_base="OTHER" /note="2'-fluoro-nucleotide"
  modified_base 3..3: /mod_base="OTHER" /note="2'-OMe-nucleotide"
  modified_base 4..4: /mod_base="OTHER" /note="2'-fluoro-nucleotide"
  modified_base 5..5: /mod_base="OTHER" /note="2'-OMe-nucleotide"
  modified_base 6..6: /mod_base="OTHER" /note="2'-fluoro-nucleotide"
  modified_base 7..7: /mod_base="OTHER" /note="2'-OMe-nucleotide"
  modified_base 8..8: /mod_base="OTHER" /note="2'-fluoro-nucleotide"
  modified_base 9..9: /mod_base="OTHER" /note="2'-OMe-nucleotide"
  modified_base 10..10: /mod_base="OTHER" /note="2'-fluoro-nucleotide"
  modified_base 11..11: /mod_base="OTHER" /note="2'-OMe-nucleotide"
  modified_base 12..12: /mod_base="OTHER" /note="2'-fluoro-nucleotide"
  modified_base 13..13: /mod_base="OTHER" /note="2'-OMe-nucleotide"
  modified_base 14..14: /mod_base="OTHER" /note="2'-fluoro-nucleotide"
  modified_base 15..15: /mod_base="OTHER" /note="2'-OMe-nucleotide"
  modified_base 16..16: /mod_base="OTHER" /note="2'-fluoro-nucleotide"
  modified_base 17..17: /mod_base="OTHER" /note="2'-OMe-nucleotide"
  modified_base 18..18: /mod_base="OTHER" /note="2'-fluoro-nucleotide"
  modified_base 19..19: /mod_base="OTHER" /note="2'-OMe-nucleotide"
  modified_base 20..20: /mod_base="OTHER" /note="dT"
  modified_base 21..21: /mod_base="OTHER" /note="dT"
uguauguuuaaucuuaaautt

SEQ ID NO: 695 - DNA, 21 bp, Artificial Sequence
  Description of Artificial Sequence: Synthetic oligonucleotide
  Description of Combined DNA/RNA Molecule: Synthetic oligonucleotide
  N-term hydroxyl group
  C-term hydroxyl group
  modified_base 1..1: /mod_base="OTHER" /note="2'-fluoro-nucleotide"
  modified_base 2..2: /mod_base="OTHER" /note="2'-fluoro-nucleotide"
  modified_base 3..3: /mod_base="OTHER" /note="2'-OMe-nucleotide"
  modified_base 4..4: /mod_base="OTHER" /note="2'-fluoro-nucleotide"
  modified_base 5..5: /mod_base="OTHER" /note="2'-OMe-nucleotide"
  modified_base 6..6: /mod_base="OTHER" /note="2'-fluoro-nucleotide"
  modified_base 7..7: /mod_base="OTHER" /note="2'-OMe-nucleotide"
  modified_base 8..8: /mod_base="OTHER" /note="2'-fluoro-nucleotide"
  modified_base 9..9: /mod_base="OTHER" /note="2'-OMe-nucleotide"
  modified_base 10..10: /mod_base="OTHER" /note="2'-fluoro-nucleotide"
  modified_base 11..11: /mod_base="OTHER" /note="2'-OMe-nucleotide"
  modified_base 12..12: /mod_base="OTHER" /note="2'-fluoro-nucleotide"
  modified_base 13..13: /mod_base="OTHER" /note="2'-OMe-nucleotide"
  modified_base 14..14: /mod_base="OTHER" /note="2'-fluoro-nucleotide"
  modified_base 15..15: /mod_base="OTHER" /note="2'-OMe-nucleotide"
  modified_base 16..16: /mod_base="OTHER" /note="2'-fluoro-nucleotide"
  modified_base 17..17: /mod_base="OTHER" /note="2'-OMe-nucleotide"
  modified_base 18..18: /mod_base="OTHER" /note="2'-fluoro-nucleotide"
  modified_base 19..19: /mod_base="OTHER" /note="2'-OMe-nucleotide"
  modified_base 20..20: /mod_base="OTHER" /note="dT"
  modified_base 21..21: /mod_base="OTHER" /note="dT"
ugauuguauguuuaaucuutt

SEQ ID NO: 696 - DNA, 21 bp, Artificial Sequence
  Description of Artificial Sequence: Synthetic oligonucleotide
  Description of Combined DNA/RNA Molecule: Synthetic oligonucleotide
  N-term hydroxyl group
  C-term hydroxyl group
  modified_base 1..1: /mod_base="OTHER" /note="2'-fluoro-nucleotide"
  modified_base 2..2: /mod_base="OTHER" /note="2'-fluoro-nucleotide"
  modified_base 3..3: /mod_base="OTHER" /note="2'-OMe-nucleotide"
  modified_base 4..4: /mod_base="OTHER" /note="2'-fluoro-nucleotide"
  modified_base 5..5: /mod_base="OTHER" /note="2'-OMe-nucleotide"
  modified_base 6..6: /mod_base="OTHER" /note="2'-fluoro-nucleotide"
  modified_base 7..7: /mod_base="OTHER" /note="2'-OMe-nucleotide"
  modified_base 8..8: /mod_base="OTHER" /note="2'-fluoro-nucleotide"
  modified_base 9..9: /mod_base="OTHER" /note="2'-OMe-nucleotide"
  modified_base 10..10: /mod_base="OTHER" /note="2'-fluoro-nucleotide"
  modified_base 11..11: /mod_base="OTHER" /note="2'-OMe-nucleotide"
  modified_base 12..12: /mod_base="OTHER" /note="2'-fluoro-nucleotide"
  modified_base 13..13: /mod_base="OTHER" /note="2'-OMe-nucleotide"
  modified_base 14..14: /mod_base="OTHER" /note="2'-fluoro-nucleotide"
  modified_base 15..15: /mod_base="OTHER" /note="2'-OMe-nucleotide"
  modified_base 16..16: /mod_base="OTHER" /note="2'-fluoro-nucleotide"
  modified_base 17..17: /mod_base="OTHER" /note="2'-OMe-nucleotide"
  modified_base 18..18: /mod_base="OTHER" /note="2'-fluoro-nucleotide"
  modified_base 19..19: /mod_base="OTHER" /note="2'-OMe-nucleotide"
  modified_base 20..20: /mod_base="OTHER" /note="dT"
  modified_base 21..21: /mod_base="OTHER" /note="dT"
gugauuguauguuuaaucutt

SEQ ID NO: 697 - DNA, 21 bp, Artificial Sequence
  Description of Artificial Sequence: Synthetic oligonucleotide
  Description of Combined DNA/RNA Molecule: Synthetic oligonucleotide
  N-term hydroxyl group
  C-term hydroxyl group
  modified_base 1..1: /mod_base="OTHER" /note="2'-fluoro-nucleotide"
  modified_base 2..2: /mod_base="OTHER" /note="2'-fluoro-nucleotide"
  modified_base 3..3: /mod_base="OTHER" /note="2'-OMe-nucleotide"
  modified_base 4..4: /mod_base="OTHER" /note="2'-fluoro-nucleotide"
  modified_base 5..5: /mod_base="OTHER" /note="2'-OMe-nucleotide"
  modified_base 6..6: /mod_base="OTHER" /note="2'-fluoro-nucleotide"
  modified_base 7..7: /mod_base="OTHER" /note="2'-OMe-nucleotide"
  modified_base 8..8: /mod_base="OTHER" /note="2'-fluoro-nucleotide"
  modified_base 9..9: /mod_base="OTHER" /note="2'-OMe-nucleotide"
  modified_base 10..10: /mod_base="OTHER" /note="2'-fluoro-nucleotide"
  modified_base 11..11: /mod_base="OTHER" /note="2'-OMe-nucleotide"
  modified_base 12..12: /mod_base="OTHER" /note="2'-fluoro-nucleotide"
  modified_base 13..13: /mod_base="OTHER" /note="2'-OMe-nucleotide"
  modified_base 14..14: /mod_base="OTHER" /note="2'-fluoro-nucleotide"
  modified_base 15..15: /mod_base="OTHER" /note="2'-OMe-nucleotide"
  modified_base 16..16: /mod_base="OTHER" /note="2'-fluoro-nucleotide"
  modified_base 17..17: /mod_base="OTHER" /note="2'-OMe-nucleotide"
  modified_base 18..18: /mod_base="OTHER" /note="2'-fluoro-nucleotide"
  modified_base 19..19: /mod_base="OTHER" /note="2'-OMe-nucleotide"
  modified_base 20..20: /mod_base="OTHER" /note="dT"
  modified_base 21..21: /mod_base="OTHER" /note="dT"
ugugauuguauguuuaauctt

SEQ ID NO: 698 - DNA, 21 bp, Artificial Sequence
  Description of Artificial Sequence: Synthetic oligonucleotide
  Description of Combined DNA/RNA Molecule: Synthetic oligonucleotide
  N-term hydroxyl group
  C-term hydroxyl group
  modified_base 1..1: /mod_base="OTHER" /note="2'-fluoro-nucleotide"
  modified_base 2..2: /mod_base="OTHER" /note="2'-fluoro-nucleotide"
  modified_base 3..3: /mod_base="OTHER" /note="2'-OMe-nucleotide"
  modified_base 4..4: /mod_base="OTHER" /note="2'-fluoro-nucleotide"
  modified_base 5..5: /mod_base="OTHER" /note="2'-OMe-nucleotide"
  modified_base 6..6: /mod_base="OTHER" /note="2'-fluoro-nucleotide"
  modified_base 7..7: /mod_base="OTHER" /note="2'-OMe-nucleotide"
  modified_base 8..8: /mod_base="OTHER" /note="2'-fluoro-nucleotide"
  modified_base 9..9: /mod_base="OTHER" /note="2'-OMe-nucleotide"
  modified_base 10..10: /mod_base="OTHER" /note="2'-fluoro-nucleotide"
  modified_base 11..11: /mod_base="OTHER" /note="2'-OMe-nucleotide"
  modified_base 12..12: /mod_base="OTHER" /note="2'-fluoro-nucleotide"
  modified_base 13..13: /mod_base="OTHER" /note="2'-OMe-nucleotide"
  modified_base 14..14: /mod_base="OTHER" /note="2'-fluoro-nucleotide"
  modified_base 15..15: /mod_base="OTHER" /note="2'-OMe-nucleotide"
  modified_base 16..16: /mod_base="OTHER" /note="2'-fluoro-nucleotide"
  modified_base 17..17: /mod_base="OTHER" /note="2'-OMe-nucleotide"
  modified_base 18..18: /mod_base="OTHER" /note="2'-fluoro-nucleotide"
  modified_base 19..19: /mod_base="OTHER" /note="2'-OMe-nucleotide"
  modified_base 20..20: /mod_base="OTHER" /note="dT"
  modified_base 21..21: /mod_base="OTHER" /note="dT"
guuaugugauuguauguuutt

SEQ ID NO: 699 - DNA, 21 bp, Artificial Sequence
  Description of Artificial Sequence: Synthetic oligonucleotide
  Description of Combined DNA/RNA Molecule: Synthetic oligonucleotide
  N-term hydroxyl group
  C-term hydroxyl group
  modified_base 1..1: /mod_base="OTHER" /note="2'-fluoro-nucleotide"
  modified_base 2..2: /mod_base="OTHER" /note="2'-fluoro-nucleotide"
  modified_base 3..3: /mod_base="OTHER" /note="2'-OMe-nucleotide"
  modified_base 4..4: /mod_base="OTHER" /note="2'-fluoro-nucleotide"
  modified_base 5..5: /mod_base="OTHER" /note="2'-OMe-nucleotide"
  modified_base 6..6: /mod_base="OTHER" /note="2'-fluoro-nucleotide"
  modified_base 7..7: /mod_base="OTHER" /note="2'-OMe-nucleotide"
  modified_base 8..8: /mod_base="OTHER" /note="2'-fluoro-nucleotide"
  modified_base 9..9: /mod_base="OTHER" /note="2'-OMe-nucleotide"
  modified_base 10..10: /mod_base="OTHER" /note="2'-fluoro-nucleotide"
  modified_base 11..11: /mod_base="OTHER" /note="2'-OMe-nucleotide"
  modified_base 12..12: /mod_base="OTHER" /note="2'-fluoro-nucleotide"
  modified_base 13..13: /mod_base="OTHER" /note="2'-OMe-nucleotide"
  modified_base 14..14: /mod_base="OTHER" /note="2'-fluoro-nucleotide"
  modified_base 15..15: /mod_base="OTHER" /note="2'-OMe-nucleotide"
  modified_base 16..16: /mod_base="OTHER" /note="2'-fluoro-nucleotide"
  modified_base 17..17: /mod_base="OTHER" /note="2'-OMe-nucleotide"
  modified_base 18..18: /mod_base="OTHER" /note="2'-fluoro-nucleotide"
  modified_base 19..19: /mod_base="OTHER" /note="2'-OMe-nucleotide"
  modified_base 20..20: /mod_base="OTHER" /note="dT"
  modified_base 21..21: /mod_base="OTHER" /note="dT"
gguuaugugauuguauguutt

SEQ ID NO: 700 - DNA, 21 bp, Artificial Sequence
  Description of Artificial Sequence: Synthetic oligonucleotide
  Description of Combined DNA/RNA Molecule: Synthetic oligonucleotide
  N-term hydroxyl group
  C-term hydroxyl group
  modified_base 1..1: /mod_base="OTHER" /note="2'-fluoro-nucleotide"
  modified_base 2..2: /mod_base="OTHER" /note="2'-fluoro-nucleotide"
  modified_base 3..3: /mod_base="OTHER" /note="2'-OMe-nucleotide"
  modified_base 4..4: /mod_base="OTHER" /note="2'-fluoro-nucleotide"
  modified_base 5..5: /mod_base="OTHER" /note="2'-OMe-nucleotide"
  modified_base 6..6: /mod_base="OTHER" /note="2'-fluoro-nucleotide"
  modified_base 7..7: /mod_base="OTHER" /note="2'-OMe-nucleotide"
  modified_base 8..8: /mod_base="OTHER" /note="2'-fluoro-nucleotide"
  modified_base 9..9: /mod_base="OTHER" /note="2'-OMe-nucleotide"
  modified_base 10..10: /mod_base="OTHER" /note="2'-fluoro-nucleotide"
  modified_base 11..11: /mod_base="OTHER" /note="2'-OMe-nucleotide"
  modified_base 12..12: /mod_base="OTHER" /note="2'-fluoro-nucleotide"
  modified_base 13..13: /mod_base="OTHER" /note="2'-OMe-nucleotide"
  modified_base 14..14: /mod_base="OTHER" /note="2'-fluoro-nucleotide"
  modified_base 15..15: /mod_base="OTHER" /note="2'-OMe-nucleotide"
  modified_base 16..16: /mod_base="OTHER" /note="2'-fluoro-nucleotide"
  modified_base 17..17: /mod_base="OTHER" /note="2'-OMe-nucleotide"
  modified_base 18..18: /mod_base="OTHER" /note="2'-fluoro-nucleotide"
  modified_base 19..19: /mod_base="OTHER" /note="2'-OMe-nucleotide"
  modified_base 20..20: /mod_base="OTHER" /note="dT"
  modified_base 21..21: /mod_base="OTHER" /note="dT"
agguuaugugauuguaugutt

SEQ ID NO: 701 - DNA, 21 bp, Artificial Sequence
  Description of Artificial Sequence: Synthetic oligonucleotide
  Description of Combined DNA/RNA Molecule: Synthetic oligonucleotide
  N-term hydroxyl group
  C-term hydroxyl group
  modified_base 1..1: /mod_base="OTHER" /note="2'-fluoro-nucleotide"
  modified_base 2..2: /mod_base="OTHER" /note="2'-fluoro-nucleotide"
  modified_base 3..3: /mod_base="OTHER" /note="2'-OMe-nucleotide"
  modified_base 4..4: /mod_base="OTHER" /note="2'-fluoro-nucleotide"
  modified_base 5..5: /mod_base="OTHER" /note="2'-OMe-nucleotide"
  modified_base 6..6: /mod_base="OTHER" /note="2'-fluoro-nucleotide"
  modified_base 7..7: /mod_base="OTHER" /note="2'-OMe-nucleotide"
  modified_base 8..8: /mod_base="OTHER" /note="2'-fluoro-nucleotide"
  modified_base 9..9: /mod_base="OTHER" /note="2'-OMe-nucleotide"
  modified_base 10..10: /mod_base="OTHER" /note="2'-fluoro-nucleotide"
  modified_base 11..11: /mod_base="OTHER" /note="2'-OMe-nucleotide"
  modified_base 12..12: /mod_base="OTHER" /note="2'-fluoro-nucleotide"
  modified_base 13..13: /mod_base="OTHER" /note="2'-OMe-nucleotide"
  modified_base 14..14: /mod_base="OTHER" /note="2'-fluoro-nucleotide"
  modified_base 15..15: /mod_base="OTHER" /note="2'-OMe-nucleotide"
  modified_base 16..16: /mod_base="OTHER" /note="2'-fluoro-nucleotide"
  modified_base 17..17: /mod_base="OTHER" /note="2'-OMe-nucleotide"
  modified_base 18..18: /mod_base="OTHER" /note="2'-fluoro-nucleotide"
  modified_base 19..19: /mod_base="OTHER" /note="2'-OMe-nucleotide"
  modified_base 20..20: /mod_base="OTHER" /note="dT"
  modified_base 21..21: /mod_base="OTHER" /note="dT"
uaagguuaugugauuguautt

SEQ ID NO: 702 - DNA, 21 bp, Artificial Sequence
  Description of Artificial Sequence: Synthetic oligonucleotide
  Description of Combined DNA/RNA Molecule: Synthetic oligonucleotide
  N-term hydroxyl group
  C-term hydroxyl group
  modified_base 1..1: /mod_base="OTHER" /note="2'-fluoro-nucleotide"
  modified_base 2..2: /mod_base="OTHER" /note="2'-fluoro-nucleotide"
  modified_base 3..3: /mod_base="OTHER" /note="2'-OMe-nucleotide"
  modified_base 4..4: /mod_base="OTHER" /note="2'-fluoro-nucleotide"
  modified_base 5..5: /mod_base="OTHER" /note="2'-OMe-nucleotide"
  modified_base 6..6: /mod_base="OTHER" /note="2'-fluoro-nucleotide"
  modified_base 7..7: /mod_base="OTHER" /note="2'-OMe-nucleotide"
  modified_base 8..8: /mod_base="OTHER" /note="2'-fluoro-nucleotide"
  modified_base 9..9: /mod_base="OTHER" /note="2'-OMe-nucleotide"
  modified_base 10..10: /mod_base="OTHER" /note="2'-fluoro-nucleotide"
  modified_base 11..11: /mod_base="OTHER" /note="2'-OMe-nucleotide"
  modified_base 12..12: /mod_base="OTHER" /note="2'-fluoro-nucleotide"
  modified_base 13..13: /mod_base="OTHER" /note="2'-OMe-nucleotide"
  modified_base 14..14: /mod_base="OTHER" /note="2'-fluoro-nucleotide"
  modified_base 15..15: /mod_base="OTHER" /note="2'-OMe-nucleotide"
  modified_base 16..16: /mod_base="OTHER" /note="2'-fluoro-nucleotide"
  modified_base 17..17: /mod_base="OTHER" /note="2'-OMe-nucleotide"
  modified_base 18..18: /mod_base="OTHER" /note="2'-fluoro-nucleotide"
  modified_base 19..19: /mod_base="OTHER" /note="2'-OMe-nucleotide"
  modified_base 20..20: /mod_base="OTHER" /note="dT"
  modified_base 21..21: /mod_base="OTHER" /note="dT"
uuuaagguuaugugauugutt

SEQ ID NO: 703 - DNA, 21 bp, Artificial Sequence
  Description of Artificial Sequence: Synthetic oligonucleotide
  Description of Combined DNA/RNA Molecule: Synthetic oligonucleotide
  N-term hydroxyl group
  C-term hydroxyl group
  modified_base 1..1: /mod_base="OTHER" /note="2'-fluoro-nucleotide"
  modified_base 2..2: /mod_base="OTHER" /note="2'-fluoro-nucleotide"
  modified_base 3..3: /mod_base="OTHER" /note="2'-OMe-nucleotide"
  modified_base 4..4: /mod_base="OTHER" /note="2'-fluoro-nucleotide"
  modified_base 5..5: /mod_base="OTHER" /note="2'-OMe-nucleotide"
  modified_base 6..6: /mod_base="OTHER" /note="2'-fluoro-nucleotide"
  modified_base 7..7: /mod_base="OTHER" /note="2'-OMe-nucleotide"
  modified_base 8..8: /mod_base="OTHER" /note="2'-fluoro-nucleotide"
  modified_base 9..9: /mod_base="OTHER" /note="2'-OMe-nucleotide"
  modified_base 10..10: /mod_base="OTHER" /note="2'-fluoro-nucleotide"
  modified_base 11..11: /mod_base="OTHER" /note="2'-OMe-nucleotide"
  modified_base 12..12: /mod_base="OTHER" /note="2'-fluoro-nucleotide"
  modified_base 13..13: /mod_base="OTHER" /note="2'-OMe-nucleotide"
  modified_base 14..14: /mod_base="OTHER" /note="2'-fluoro-nucleotide"
  modified_base 15..15: /mod_base="OTHER" /note="2'-OMe-nucleotide"
  modified_base 16..16: /mod_base="OTHER" /note="2'-fluoro-nucleotide"
  modified_base 17..17: /mod_base="OTHER" /note="2'-OMe-nucleotide"
  modified_base 18..18: /mod_base="OTHER" /note="2'-fluoro-nucleotide"
  modified_base 19..19: /mod_base="OTHER" /note="2'-OMe-nucleotide"
  modified_base 20..20: /mod_base="OTHER" /note="dT"
  modified_base 21..21: /mod_base="OTHER" /note="dT"
cuuuaagguuaugugauugtt

SEQ ID NO: 704 - DNA, 21 bp, Artificial Sequence
  Description of Artificial Sequence: Synthetic oligonucleotide
  Description of Combined DNA/RNA Molecule: Synthetic oligonucleotide
  N-term hydroxyl group
  C-term hydroxyl group
  modified_base 1..1: /mod_base="OTHER" /note="2'-fluoro-nucleotide"
  modified_base 2..2: /mod_base="OTHER" /note="2'-fluoro-nucleotide"
  modified_base 3..3: /mod_base="OTHER" /note="2'-OMe-nucleotide"
  modified_base 4..4: /mod_base="OTHER" /note="2'-fluoro-nucleotide"
  modified_base 5..5: /mod_base="OTHER" /note="2'-OMe-nucleotide"
  modified_base 6..6: /mod_base="OTHER" /note="2'-fluoro-nucleotide"
  modified_base 7..7: /mod_base="OTHER" /note="2'-OMe-nucleotide"
  modified_base 8..8: /mod_base="OTHER" /note="2'-fluoro-nucleotide"
  modified_base 9..9: /mod_base="OTHER" /note="2'-OMe-nucleotide"
  modified_base 10..10: /mod_base="OTHER" /note="2'-fluoro-nucleotide"
  modified_base 11..11: /mod_base="OTHER" /note="2'-OMe-nucleotide"
  modified_base 12..12: /mod_base="OTHER" /note="2'-fluoro-nucleotide"
  modified_base 13..13: /mod_base="OTHER" /note="2'-OMe-nucleotide"
  modified_base 14..14: /mod_base="OTHER" /note="2'-fluoro-nucleotide"
  modified_base 15..15: /mod_base="OTHER" /note="2'-OMe-nucleotide"
  modified_base 16..16: /mod_base="OTHER" /note="2'-fluoro-nucleotide"
  modified_base 17..17: /mod_base="OTHER" /note="2'-OMe-nucleotide"
  modified_base 18..18: /mod_base="OTHER" /note="2'-fluoro-nucleotide"
  modified_base 19..19: /mod_base="OTHER" /note="2'-OMe-nucleotide"
  modified_base 20..20: /mod_base="OTHER" /note="dT"
  modified_base 21..21: /mod_base="OTHER" /note="dT"
ucuuuaagguuaugugauutt

SEQ ID NO: 705 - DNA, 21 bp, Artificial Sequence
  Description of Artificial Sequence: Synthetic oligonucleotide
  Description of Combined DNA/RNA Molecule: Synthetic oligonucleotide
  N-term hydroxyl group
  C-term hydroxyl group
  modified_base 1..1: /mod_base="OTHER" /note="2'-fluoro-nucleotide"
  modified_base 2..2: /mod_base="OTHER" /note="2'-fluoro-nucleotide"
  modified_base 3..3: /mod_base="OTHER" /note="2'-OMe-nucleotide"
  modified_base 4..4: /mod_base="OTHER" /note="2'-fluoro-nucleotide"
  modified_base 5..5: /mod_base="OTHER" /note="2'-OMe-nucleotide"
  modified_base 6..6: /mod_base="OTHER" /note="2'-fluoro-nucleotide"
  modified_base 7..7: /mod_base="OTHER" /note="2'-OMe-nucleotide"
  modified_base 8..8: /mod_base="OTHER" /note="2'-fluoro-nucleotide"
  modified_base 9..9: /mod_base="OTHER" /note="2'-OMe-nucleotide"
  modified_base 10..10: /mod_base="OTHER" /note="2'-fluoro-nucleotide"
  modified_base 11..11: /mod_base="OTHER" /note="2'-OMe-nucleotide"
  modified_base 12..12: /mod_base="OTHER" /note="2'-fluoro-nucleotide"
  modified_base 13..13: /mod_base="OTHER" /note="2'-OMe-nucleotide"
  modified_base 14..14: /mod_base="OTHER" /note="2'-fluoro-nucleotide"
  modified_base 15..15: /mod_base="OTHER" /note="2'-OMe-nucleotide"
  modified_base 16..16: /mod_base="OTHER" /note="2'-fluoro-nucleotide"
  modified_base 17..17: /mod_base="OTHER" /note="2'-OMe-nucleotide"
  modified_base 18..18: /mod_base="OTHER" /note="2'-fluoro-nucleotide"
  modified_base 19..19: /mod_base="OTHER" /note="2'-OMe-nucleotide"
  modified_base 20..20: /mod_base="OTHER" /note="dT"
  modified_base 21..21: /mod_base="OTHER" /note="dT"
uucuuuaagguuaugugautt

SEQ ID NO: 706 - DNA, 21 bp, Artificial Sequence
  Description of Artificial Sequence: Synthetic oligonucleotide
  Description of Combined DNA/RNA Molecule: Synthetic oligonucleotide
  N-term hydroxyl group
  C-term hydroxyl group
  modified_base 1..1: /mod_base="OTHER" /note="2'-fluoro-nucleotide"
  modified_base 2..2: /mod_base="OTHER" /note="2'-fluoro-nucleotide"
  modified_base 3..3: /mod_base="OTHER" /note="2'-OMe-nucleotide"
  modified_base 4..4: /mod_base="OTHER" /note="2'-fluoro-nucleotide"
  modified_base 5..5: /mod_base="OTHER" /note="2'-OMe-nucleotide"
  modified_base 6..6: /mod_base="OTHER" /note="2'-fluoro-nucleotide"
  modified_base 7..7: /mod_base="OTHER" /note="2'-OMe-nucleotide"
  modified_base 8..8: /mod_base="OTHER" /note="2'-fluoro-nucleotide"
  modified_base 9..9: /mod_base="OTHER" /note="2'-OMe-nucleotide"
  modified_base 10..10: /mod_base="OTHER" /note="2'-fluoro-nucleotide"
  modified_base 11..11: /mod_base="OTHER" /note="2'-OMe-nucleotide"
  modified_base 12..12: /mod_base="OTHER" /note="2'-fluoro-nucleotide"
  modified_base 13..13: /mod_base="OTHER" /note="2'-OMe-nucleotide"
  modified_base 14..14: /mod_base="OTHER" /note="2'-fluoro-nucleotide"
  modified_base 15..15: /mod_base="OTHER" /note="2'-OMe-nucleotide"
  modified_base 16..16: /mod_base="OTHER" /note="2'-fluoro-nucleotide"
  modified_base 17..17: /mod_base="OTHER" /note="2'-OMe-nucleotide"
  modified_base 18..18: /mod_base="OTHER" /note="2'-fluoro-nucleotide"
  modified_base 19..19: /mod_base="OTHER" /note="2'-OMe-nucleotide"
  modified_base 20..20: /mod_base="OTHER" /note="dT"
  modified_base 21..21: /mod_base="OTHER" /note="dT"
auucuuuaagguuaugugatt

SEQ ID NO: 707 - DNA, 21 bp, Artificial Sequence
  Description of Artificial Sequence: Synthetic oligonucleotide
  Description of Combined DNA/RNA Molecule: Synthetic oligonucleotide
  N-term hydroxyl group
  C-term hydroxyl group
  modified_base 1..1: /mod_base="OTHER" /note="2'-fluoro-nucleotide"
  modified_base 2..2: /mod_base="OTHER" /note="2'-fluoro-nucleotide"
  modified_base 3..3: /mod_base="OTHER" /note="2'-OMe-nucleotide"
  modified_base 4..4: /mod_base="OTHER" /note="2'-fluoro-nucleotide"
  modified_base 5..5: /mod_base="OTHER" /note="2'-OMe-nucleotide"
  modified_base 6..6: /mod_base="OTHER" /note="2'-fluoro-nucleotide"
  modified_base 7..7: /mod_base="OTHER" /note="2'-OMe-nucleotide"
  modified_base 8..8: /mod_base="OTHER" /note="2'-fluoro-nucleotide"
  modified_base 9..9: /mod_base="OTHER" /note="2'-OMe-nucleotide"
  modified_base 10..10: /mod_base="OTHER" /note="2'-fluoro-nucleotide"
  modified_base 11..11: /mod_base="OTHER" /note="2'-OMe-nucleotide"
  modified_base 12..12: /mod_base="OTHER" /note="2'-fluoro-nucleotide"
  modified_base 13..13: /mod_base="OTHER" /note="2'-OMe-nucleotide"
  modified_base 14..14: /mod_base="OTHER" /note="2'-fluoro-nucleotide"
  modified_base 15..15: /mod_base="OTHER" /note="2'-OMe-nucleotide"
  modified_base 16..16: /mod_base="OTHER" /note="2'-fluoro-nucleotide"
  modified_base 17..17: /mod_base="OTHER" /note="2'-OMe-nucleotide"
  modified_base 18..18: /mod_base="OTHER" /note="2'-fluoro-nucleotide"
  modified_base 19..19: /mod_base="OTHER" /note="2'-OMe-nucleotide"
  modified_base 20..20: /mod_base="OTHER" /note="dT"
  modified_base 21..21: /mod_base="OTHER" /note="dT"
uauucuuuaagguuaugugtt

SEQ ID NO: 708 - DNA, 21 bp, Artificial Sequence
  Description of Artificial Sequence: Synthetic oligonucleotide
  Description of Combined DNA/RNA Molecule: Synthetic oligonucleotide
  N-term hydroxyl group
  C-term hydroxyl group
  modified_base 1..1: /mod_base="OTHER" /note="2'-fluoro-nucleotide"
  modified_base 2..2: /mod_base="OTHER" /note="2'-fluoro-nucleotide"
  modified_base 3..3: /mod_base="OTHER" /note="2'-OMe-nucleotide"
  modified_base 4..4: /mod_base="OTHER" /note="2'-fluoro-nucleotide"
  modified_base 5..5: /mod_base="OTHER" /note="2'-OMe-nucleotide"
  modified_base 6..6: /mod_base="OTHER" /note="2'-fluoro-nucleotide"
  modified_base 7..7: /mod_base="OTHER" /note="2'-OMe-nucleotide"
  modified_base 8..8: /mod_base="OTHER" /note="2'-fluoro-nucleotide"
  modified_base 9..9: /mod_base="OTHER" /note="2'-OMe-nucleotide"
  modified_base 10..10: /mod_base="OTHER" /note="2'-fluoro-nucleotide"
  modified_base 11..11: /mod_base="OTHER" /note="2'-OMe-nucleotide"
  modified_base 12..12: /mod_base="OTHER" /note="2'-fluoro-nucleotide"
  modified_base 13..13: /mod_base="OTHER" /note="2'-OMe-nucleotide"
  modified_base 14..14: /mod_base="OTHER" /note="2'-fluoro-nucleotide"
  modified_base 15..15: /mod_base="OTHER" /note="2'-OMe-nucleotide"
  modified_base 16..16: /mod_base="OTHER" /note="2'-fluoro-nucleotide"
  modified_base 17..17: /mod_base="OTHER" /note="2'-OMe-nucleotide"
  modified_base 18..18: /mod_base="OTHER" /note="2'-fluoro-nucleotide"
  modified_base 19..19: /mod_base="OTHER" /note="2'-OMe-nucleotide"
  modified_base 20..20: /mod_base="OTHER" /note="dT"
  modified_base 21..21: /mod_base="OTHER" /note="dT"
guauucuuuaagguuaugutt

SEQ ID NO: 709 - DNA, 21 bp, Artificial Sequence
  Description of Artificial Sequence: Synthetic oligonucleotide
  Description of Combined DNA/RNA Molecule: Synthetic oligonucleotide
  N-term hydroxyl group
  C-term hydroxyl group
  modified_base 1..1: /mod_base="OTHER" /note="2'-fluoro-nucleotide"
  modified_base 2..2: /mod_base="OTHER" /note="2'-fluoro-nucleotide"
  modified_base 3..3: /mod_base="OTHER" /note="2'-OMe-nucleotide"
  modified_base 4..4: /mod_base="OTHER" /note="2'-fluoro-nucleotide"
  modified_base 5..5: /mod_base="OTHER" /note="2'-OMe-nucleotide"
  modified_base 6..6: /mod_base="OTHER" /note="2'-fluoro-nucleotide"
  modified_base 7..7: /mod_base="OTHER" /note="2'-OMe-nucleotide"
  modified_base 8..8: /mod_base="OTHER" /note="2'-fluoro-nucleotide"
  modified_base 9..9: /mod_base="OTHER" /note="2'-OMe-nucleotide"
  modified_base 10..10: /mod_base="OTHER" /note="2'-fluoro-nucleotide"
  modified_base 11..11: /mod_base="OTHER" /note="2'-OMe-nucleotide"
  modified_base 12..12: /mod_base="OTHER" /note="2'-fluoro-nucleotide"
  modified_base 13..13: /mod_base="OTHER" /note="2'-OMe-nucleotide"
  modified_base 14..14: /mod_base="OTHER" /note="2'-fluoro-nucleotide"
  modified_base 15..15: /mod_base="OTHER" /note="2'-OMe-nucleotide"
  modified_base 16..16: /mod_base="OTHER" /note="2'-fluoro-nucleotide"
  modified_base 17..17: /mod_base="OTHER" /note="2'-OMe-nucleotide"
  modified_base 18..18: /mod_base="OTHER" /note="2'-fluoro-nucleotide"
  modified_base 19..19: /mod_base="OTHER" /note="2'-OMe-nucleotide"
  modified_base 20..20: /mod_base="OTHER" /note="dT"
  modified_base 21..21: /mod_base="OTHER" /note="dT"
gguauucuuuaagguuaugtt

SEQ ID NO: 710 - DNA, 21 bp, Artificial Sequence
  Description of Artificial Sequence: Synthetic oligonucleotide
  Description of Combined DNA/RNA Molecule: Synthetic oligonucleotide
  N-term hydroxyl group
  C-term hydroxyl group
  modified_base 1..1: /mod_base="OTHER" /note="2'-fluoro-nucleotide"
  modified_base 2..2: /mod_base="OTHER" /note="2'-fluoro-nucleotide"
  modified_base 3..3: /mod_base="OTHER" /note="2'-OMe-nucleotide"
  modified_base 4..4: /mod_base="OTHER" /note="2'-fluoro-nucleotide"
  modified_base 5..5: /mod_base="OTHER" /note="2'-OMe-nucleotide"
  modified_base 6..6: /mod_base="OTHER" /note="2'-fluoro-nucleotide"
  modified_base 7..7: /mod_base="OTHER" /note="2'-OMe-nucleotide"
  modified_base 8..8: /mod_base="OTHER" /note="2'-fluoro-nucleotide"
  modified_base 9..9: /mod_base="OTHER" /note="2'-OMe-nucleotide"
  modified_base 10..10: /mod_base="OTHER" /note="2'-fluoro-nucleotide"
  modified_base 11..11: /mod_base="OTHER" /note="2'-OMe-nucleotide"
  modified_base 12..12: /mod_base="OTHER" /note="2'-fluoro-nucleotide"
  modified_base 13..13: /mod_base="OTHER" /note="2'-OMe-nucleotide"
  modified_base 14..14: /mod_base="OTHER" /note="2'-fluoro-nucleotide"
  modified_base 15..15: /mod_base="OTHER" /note="2'-OMe-nucleotide"
  modified_base 16..16: /mod_base="OTHER" /note="2'-fluoro-nucleotide"
  modified_base 17..17: /mod_base="OTHER" /note="2'-OMe-nucleotide"
  modified_base 18..18: /mod_base="OTHER" /note="2'-fluoro-nucleotide"
  modified_base 19..19: /mod_base="OTHER" /note="2'-OMe-nucleotide"
  modified_base 20..20: /mod_base="OTHER" /note="dT"
  modified_base 21..21: /mod_base="OTHER" /note="dT"
gaauuuugauugagaaaugtt

SEQ ID NO: 711 - DNA, 21 bp, Artificial Sequence
  Description of Artificial Sequence: Synthetic oligonucleotide
  Description of Combined DNA/RNA Molecule: Synthetic oligonucleotide
  N-term hydroxyl group
  C-term hydroxyl group
  modified_base 1..1: /mod_base="OTHER" /note="2'-fluoro-nucleotide"
  modified_base 2..2: /mod_base="OTHER" /note="2'-fluoro-nucleotide"
  modified_base 3..3: /mod_base="OTHER" /note="2'-OMe-nucleotide"
  modified_base 4..4: /mod_base="OTHER" /note="2'-fluoro-nucleotide"
  modified_base 5..5: /mod_base="OTHER" /note="2'-OMe-nucleotide"
  modified_base 6..6: /mod_base="OTHER" /note="2'-fluoro-nucleotide"
  modified_base 7..7: /mod_base="OTHER" /note="2'-OMe-nucleotide"
  modified_base 8..8: /mod_base="OTHER" /note="2'-fluoro-nucleotide"
  modified_base 9..9: /mod_base="OTHER" /note="2'-OMe-nucleotide"
  modified_base 10..10: /mod_base="OTHER" /note="2'-fluoro-nucleotide"
  modified_base 11..11: /mod_base="OTHER" /note="2'-OMe-nucleotide"
  modified_base 12..12: /mod_base="OTHER" /note="2'-fluoro-nucleotide"
  modified_base 13..13: /mod_base="OTHER" /note="2'-OMe-nucleotide"
  modified_base 14..14: /mod_base="OTHER" /note="2'-fluoro-nucleotide"
  modified_base 15..15: /mod_base="OTHER" /note="2'-OMe-nucleotide"
  modified_base 16..16: /mod_base="OTHER" /note="2'-fluoro-nucleotide"
  modified_base 17..17: /mod_base="OTHER" /note="2'-OMe-nucleotide"
  modified_base 18..18: /mod_base="OTHER" /note="2'-fluoro-nucleotide"
  modified_base 19..19: /mod_base="OTHER" /note="2'-OMe-nucleotide"
  modified_base 20..20: /mod_base="OTHER" /note="dT"
  modified_base 21..21: /mod_base="OTHER" /note="dT"
uaagaauuuugauugagaatt

SEQ ID NO: 712 - DNA, 21 bp, Artificial Sequence
  Description of Artificial Sequence: Synthetic oligonucleotide
  Description of Combined DNA/RNA Molecule: Synthetic oligonucleotide
  N-term hydroxyl group
  C-term hydroxyl group
  modified_base 1..1: /mod_base="OTHER" /note="2'-fluoro-nucleotide"
  modified_base 2..2: /mod_base="OTHER" /note="2'-fluoro-nucleotide"
  modified_base 3..3: /mod_base="OTHER" /note="2'-OMe-nucleotide"
  modified_base 4..4: /mod_base="OTHER" /note="2'-fluoro-nucleotide"
  modified_base 5..5: /mod_base="OTHER" /note="2'-OMe-nucleotide"
  modified_base 6..6: /mod_base="OTHER" /note="2'-fluoro-nucleotide"
  modified_base 7..7: /mod_base="OTHER" /note="2'-OMe-nucleotide"
  modified_base 8..8: /mod_base="OTHER" /note="2'-fluoro-nucleotide"
  modified_base 9..9: /mod_base="OTHER" /note="2'-OMe-nucleotide"
  modified_base 10..10: /mod_base="OTHER" /note="2'-fluoro-nucleotide"
  modified_base 11..11: /mod_base="OTHER" /note="2'-OMe-nucleotide"
  modified_base 12..12: /mod_base="OTHER" /note="2'-fluoro-nucleotide"
  modified_base 13..13: /mod_base="OTHER" /note="2'-OMe-nucleotide"
  modified_base 14..14: /mod_base="OTHER" /note="2'-fluoro-nucleotide"
  modified_base 15..15: /mod_base="OTHER" /note="2'-OMe-nucleotide"
  modified_base 16..16: /mod_base="OTHER" /note="2'-fluoro-nucleotide"
  modified_base 17..17: /mod_base="OTHER" /note="2'-OMe-nucleotide"
  modified_base 18..18: /mod_base="OTHER" /note="2'-fluoro-nucleotide"
  modified_base 19..19: /mod_base="OTHER" /note="2'-OMe-nucleotide"
  modified_base 20..20: /mod_base="OTHER" /note="dT"
  modified_base 21..21: /mod_base="OTHER" /note="dT"
gauucccacaucacaaaautt

SEQ ID NO: 713 - DNA, 21 bp, Artificial Sequence
  Description of Artificial Sequence: Synthetic oligonucleotide
  Description of Combined DNA/RNA Molecule: Synthetic oligonucleotide
  N-term hydroxyl group
  C-term hydroxyl group
  modified_base 1..1: /mod_base="OTHER" /note="2'-fluoro-nucleotide"
  modified_base 2..2: /mod_base="OTHER" /note="2'-fluoro-nucleotide"
  modified_base 3..3: /mod_base="OTHER" /note="2'-OMe-nucleotide"
  modified_base 4..4: /mod_base="OTHER" /note="2'-fluoro-nucleotide"
  modified_base 5..5: /mod_base="OTHER" /note="2'-OMe-nucleotide"
  modified_base 6..6: /mod_base="OTHER" /note="2'-fluoro-nucleotide"
  modified_base 7..7: /mod_base="OTHER" /note="2'-OMe-nucleotide"
  modified_base 8..8: /mod_base="OTHER" /note="2'-fluoro-nucleotide"
  modified_base 9..9: /mod_base="OTHER" /note="2'-OMe-nucleotide"
  modified_base 10..10: /mod_base="OTHER" /note="2'-fluoro-nucleotide"
  modified_base 11..11: /mod_base="OTHER" /note="2'-OMe-nucleotide"
  modified_base 12..12: /mod_base="OTHER" /note="2'-fluoro-nucleotide"
  modified_base 13..13: /mod_base="OTHER" /note="2'-OMe-nucleotide"
  modified_base 14..14: /mod_base="OTHER" /note="2'-fluoro-nucleotide"
  modified_base 15..15: /mod_base="OTHER" /note="2'-OMe-nucleotide"
  modified_base 16..16: /mod_base="OTHER" /note="2'-fluoro-nucleotide"
  modified_base 17..17: /mod_base="OTHER" /note="2'-OMe-nucleotide"
  modified_base 18..18: /mod_base="OTHER" /note="2'-fluoro-nucleotide"
  modified_base 19..19: /mod_base="OTHER" /note="2'-OMe-nucleotide"
  modified_base 20..20: /mod_base="OTHER" /note="dT"
  modified_base 21..21: /mod_base="OTHER" /note="dT"
ugauucccacaucacaaaatt

SEQ ID NO: 714 - DNA, 21 bp, Artificial Sequence
  Description of Artificial Sequence: Synthetic oligonucleotide
  Description of Combined DNA/RNA Molecule: Synthetic oligonucleotide
  N-term hydroxyl group
  C-term hydroxyl group
  modified_base 1..1: /mod_base="OTHER" /note="2'-fluoro-nucleotide"
  modified_base 2..2: /mod_base="OTHER" /note="2'-fluoro-nucleotide"
  modified_base 3..3: /mod_base="OTHER" /note="2'-OMe-nucleotide"
  modified_base 4..4: /mod_base="OTHER" /note="2'-fluoro-nucleotide"
  modified_base 5..5: /mod_base="OTHER" /note="2'-OMe-nucleotide"
  modified_base 6..6: /mod_base="OTHER" /note="2'-fluoro-nucleotide"
  modified_base 7..7: /mod_base="OTHER" /note="2'-OMe-nucleotide"
  modified_base 8..8: /mod_base="OTHER" /note="2'-fluoro-nucleotide"
  modified_base 9..9: /mod_base="OTHER" /note="2'-OMe-nucleotide"
  modified_base 10..10: /mod_base="OTHER" /note="2'-fluoro-nucleotide"
  modified_base 11..11: /mod_base="OTHER" /note="2'-OMe-nucleotide"
  modified_base 12..12: /mod_base="OTHER" /note="2'-fluoro-nucleotide"
  modified_base 13..13: /mod_base="OTHER" /note="2'-OMe-nucleotide"
  modified_base 14..14: /mod_base="OTHER" /note="2'-fluoro-nucleotide"
  modified_base 15..15: /mod_base="OTHER" /note="2'-OMe-nucleotide"
  modified_base 16..16: /mod_base="OTHER" /note="2'-fluoro-nucleotide"
  modified_base 17..17: /mod_base="OTHER" /note="2'-OMe-nucleotide"
  modified_base 18..18: /mod_base="OTHER" /note="2'-fluoro-nucleotide"
  modified_base 19..19: /mod_base="OTHER" /note="2'-OMe-nucleotide"
  modified_base 20..20: /mod_base="OTHER" /note="dT"
  modified_base 21..21: /mod_base="OTHER" /note="dT"
uugauucccacaucacaaatt

SEQ ID NO: 715 - DNA, 21 bp, Artificial Sequence
  Description of Artificial Sequence: Synthetic oligonucleotide
  Description of Combined DNA/RNA Molecule: Synthetic oligonucleotide
  N-term hydroxyl group
  C-term hydroxyl group
  modified_base 1..1: /mod_base="OTHER" /note="2'-fluoro-nucleotide"
  modified_base 2..2: /mod_base="OTHER" /note="2'-fluoro-nucleotide"
  modified_base 3..3: /mod_base="OTHER" /note="2'-OMe-nucleotide"
  modified_base 4..4: /mod_base="OTHER" /note="2'-fluoro-nucleotide"
  modified_base 5..5: /mod_base="OTHER" /note="2'-OMe-nucleotide"
  modified_base 6..6: /mod_base="OTHER" /note="2'-fluoro-nucleotide"
  modified_base 7..7: /mod_base="OTHER" /note="2'-OMe-nucleotide"
  modified_base 8..8: /mod_base="OTHER" /note="2'-fluoro-nucleotide"
  modified_base 9..9: /mod_base="OTHER" /note="2'-OMe-nucleotide"
  modified_base 10..10: /mod_base="OTHER" /note="2'-fluoro-nucleotide"
  modified_base 11..11: /mod_base="OTHER" /note="2'-OMe-nucleotide"
  modified_base 12..12: /mod_base="OTHER" /note="2'-fluoro-nucleotide"
  modified_base 13..13: /mod_base="OTHER" /note="2'-OMe-nucleotide"
  modified_base 14..14: /mod_base="OTHER" /note="2'-fluoro-nucleotide"
  modified_base 15..15: /mod_base="OTHER" /note="2'-OMe-nucleotide"
  modified_base 16..16: /mod_base="OTHER" /note="2'-fluoro-nucleotide"
  modified_base 17..17: /mod_base="OTHER" /note="2'-OMe-nucleotide"
  modified_base 18..18: /mod_base="OTHER" /note="2'-fluoro-nucleotide"
  modified_base 19..19: /mod_base="OTHER" /note="2'-OMe-nucleotide"
  modified_base 20..20: /mod_base="OTHER" /note="dT"
  modified_base 21..21: /mod_base="OTHER" /note="dT"
auugauucccacaucacaatt

SEQ ID NO: 716 - DNA, 21 bp, Artificial Sequence
  Description of Artificial Sequence: Synthetic oligonucleotide
  Description of Combined DNA/RNA Molecule: Synthetic oligonucleotide
  N-term hydroxyl group
  C-term hydroxyl group
  modified_base 1..1: /mod_base="OTHER" /note="2'-fluoro-nucleotide"
  modified_base 2..2: /mod_base="OTHER" /note="2'-fluoro-nucleotide"
  modified_base 3..3: /mod_base="OTHER" /note="2'-OMe-nucleotide"
  modified_base 4..4: /mod_base="OTHER" /note="2'-fluoro-nucleotide"
  modified_base 5..5: /mod_base="OTHER" /note="2'-OMe-nucleotide"
  modified_base 6..6: /mod_base="OTHER" /note="2'-fluoro-nucleotide"
  modified_base 7..7: /mod_base="OTHER" /note="2'-OMe-nucleotide"
  modified_base 8..8: /mod_base="OTHER" /note="2'-fluoro-nucleotide"
  modified_base 9..9: /mod_base="OTHER" /note="2'-OMe-nucleotide"
  modified_base 10..10: /mod_base="OTHER" /note="2'-fluoro-nucleotide"
  modified_base 11..11: /mod_base="OTHER" /note="2'-OMe-nucleotide"
  modified_base 12..12: /mod_base="OTHER" /note="2'-fluoro-nucleotide"
  modified_base 13..13: /mod_base="OTHER" /note="2'-OMe-nucleotide"
  modified_base 14..14: /mod_base="OTHER" /note="2'-fluoro-nucleotide"
  modified_base 15..15: /mod_base="OTHER" /note="2'-OMe-nucleotide"
  modified_base 16..16: /mod_base="OTHER" /note="2'-fluoro-nucleotide"
  modified_base 17..17: /mod_base="OTHER" /note="2'-OMe-nucleotide"
  modified_base 18..18: /mod_base="OTHER" /note="2'-fluoro-nucleotide"
  modified_base 19..19: /mod_base="OTHER" /note="2'-OMe-nucleotide"
  modified_base 20..20: /mod_base="OTHER" /note="dT"
  modified_base 21..21: /mod_base="OTHER" /note="dT"
aauugauucccacaucacatt

SEQ ID NO: 717 - DNA, 21 bp, Artificial Sequence
  Description of Artificial Sequence: Synthetic oligonucleotide
  Description of Combined DNA/RNA Molecule: Synthetic oligonucleotide
  N-term hydroxyl group
  C-term hydroxyl group
  modified_base 1..1: /mod_base="OTHER" /note="2'-fluoro-nucleotide"
  modified_base 2..2: /mod_base="OTHER" /note="2'-fluoro-nucleotide"
  modified_base 3..3: /mod_base="OTHER" /note="2'-OMe-nucleotide"
  modified_base 4..4: /mod_base="OTHER" /note="2'-fluoro-nucleotide"
  modified_base 5..5: /mod_base="OTHER" /note="2'-OMe-nucleotide"
  modified_base 6..6: /mod_base="OTHER" /note="2'-fluoro-nucleotide"
  modified_base 7..7: /mod_base="OTHER" /note="2'-OMe-nucleotide"
  modified_base 8..8: /mod_base="OTHER" /note="2'-fluoro-nucleotide"
  modified_base 9..9: /mod_base="OTHER" /note="2'-OMe-nucleotide"
  modified_base 10..10: /mod_base="OTHER" /note="2'-fluoro-nucleotide"
  modified_base 11..11: /mod_base="OTHER" /note="2'-OMe-nucleotide"
  modified_base 12..12: /mod_base="OTHER" /note="2'-fluoro-nucleotide"
  modified_base 13..13: /mod_base="OTHER" /note="2'-OMe-nucleotide"
  modified_base 14..14: /mod_base="OTHER" /note="2'-fluoro-nucleotide"
  modified_base 15..15: /mod_base="OTHER" /note="2'-OMe-nucleotide"
  modified_base 16..16: /mod_base="OTHER" /note="2'-fluoro-nucleotide"
  modified_base 17..17: /mod_base="OTHER" /note="2'-OMe-nucleotide"
  modified_base 18..18: /mod_base="OTHER" /note="2'-fluoro-nucleotide"
  modified_base 19..19: /mod_base="OTHER" /note="2'-OMe-nucleotide"
  modified_base 20..20: /mod_base="OTHER" /note="dT"
  modified_base 21..21: /mod_base="OTHER" /note="dT"
aaauugauucccacaucactt

SEQ ID NO: 718 - DNA, 21 bp, Artificial Sequence
  Description of Artificial Sequence: Synthetic oligonucleotide
  Description of Combined DNA/RNA Molecule: Synthetic oligonucleotide
  N-term hydroxyl group
  C-term hydroxyl group
  modified_base 1..1: /mod_base="OTHER" /note="2'-fluoro-nucleotide"
  modified_base 2..2: /mod_base="OTHER" /note="2'-fluoro-nucleotide"
  modified_base 3..3: /mod_base="OTHER" /note="2'-OMe-nucleotide"
  modified_base 4..4: /mod_base="OTHER" /note="2'-fluoro-nucleotide"
  modified_base 5..5: /mod_base="OTHER" /note="2'-OMe-nucleotide"
  modified_base 6..6: /mod_base="OTHER" /note="2'-fluoro-nucleotide"
  modified_base 7..7: /mod_base="OTHER" /note="2'-OMe-nucleotide"
  modified_base 8..8: /mod_base="OTHER" /note="2'-fluoro-nucleotide"
  modified_base 9..9: /mod_base="OTHER" /note="2'-OMe-nucleotide"
  modified_base 10..10: /mod_base="OTHER" /note="2'-fluoro-nucleotide"
  modified_base 11..11: /mod_base="OTHER" /note="2'-OMe-nucleotide"
  modified_base 12..12: /mod_base="OTHER" /note="2'-fluoro-nucleotide"
  modified_base 13..13: /mod_base="OTHER" /note="2'-OMe-nucleotide"
  modified_base 14..14: /mod_base="OTHER" /note="2'-fluoro-nucleotide"
  modified_base 15..15: /mod_base="OTHER" /note="2'-OMe-nucleotide"
  modified_base 16..16: /mod_base="OTHER" /note="2'-fluoro-nucleotide"
  modified_base 17..17: /mod_base="OTHER" /note="2'-OMe-nucleotide"
  modified_base 18..18: /mod_base="OTHER" /note="2'-fluoro-nucleotide"
  modified_base 19..19: /mod_base="OTHER" /note="2'-OMe-nucleotide"
  modified_base 20..20: /mod_base="OTHER" /note="dT"
  modified_base 21..21: /mod_base="OTHER" /note="dT"
aaaauugauucccacaucatt

SEQ ID NO: 719 - DNA, 21 bp, Artificial Sequence
  Description of Artificial Sequence: Synthetic oligonucleotide
  Description of Combined DNA/RNA Molecule: Synthetic oligonucleotide
  N-term hydroxyl group
  C-term hydroxyl group
  modified_base 1..1: /mod_base="OTHER" /note="2'-fluoro-nucleotide"
  modified_base 2..2: /mod_base="OTHER" /note="2'-fluoro-nucleotide"
  modified_base 3..3: /mod_base="OTHER" /note="2'-OMe-nucleotide"
  modified_base 4..4: /mod_base="OTHER" /note="2'-fluoro-nucleotide"
  modified_base 5..5: /mod_base="OTHER" /note="2'-OMe-nucleotide"
  modified_base 6..6: /mod_base="OTHER" /note="2'-fluoro-nucleotide"
  modified_base 7..7: /mod_base="OTHER" /note="2'-OMe-nucleotide"
  modified_base 8..8: /mod_base="OTHER" /note="2'-fluoro-nucleotide"
  modified_base 9..9: /mod_base="OTHER" /note="2'-OMe-nucleotide"
  modified_base 10..10: /mod_base="OTHER" /note="2'-fluoro-nucleotide"
  modified_base 11..11: /mod_base="OTHER" /note="2'-OMe-nucleotide"
  modified_base 12..12: /mod_base="OTHER" /note="2'-fluoro-nucleotide"
  modified_base 13..13: /mod_base="OTHER" /note="2'-OMe-nucleotide"
  modified_base 14..14: /mod_base="OTHER" /note="2'-fluoro-nucleotide"
  modified_base 15..15: /mod_base="OTHER" /note="2'-OMe-nucleotide"
  modified_base 16..16: /mod_base="OTHER" /note="2'-fluoro-nucleotide"
  modified_base 17..17: /mod_base="OTHER" /note="2'-OMe-nucleotide"
  modified_base 18..18: /mod_base="OTHER" /note="2'-fluoro-nucleotide"
  modified_base 19..19: /mod_base="OTHER" /note="2'-OMe-nucleotide"
  modified_base 20..20: /mod_base="OTHER" /note="dT"
  modified_base 21..21: /mod_base="OTHER" /note="dT"
uaaaauugauucccacauctt

SEQ ID NO: 720 - DNA, 21 bp, Artificial Sequence
  Description of Artificial Sequence: Synthetic oligonucleotide
  Description of Combined DNA/RNA Molecule: Synthetic oligonucleotide
  N-term hydroxyl group
  C-term hydroxyl group
  modified_base 1..1: /mod_base="OTHER" /note="2'-fluoro-nucleotide"
  modified_base 2..2: /mod_base="OTHER" /note="2'-fluoro-nucleotide"
  modified_base 3..3: /mod_base="OTHER" /note="2'-OMe-nucleotide"
  modified_base 4..4: /mod_base="OTHER" /note="2'-fluoro-nucleotide"
  modified_base 5..5: /mod_base="OTHER" /note="2'-OMe-nucleotide"
  modified_base 6..6: /mod_base="OTHER" /note="2'-fluoro-nucleotide"
  modified_base 7..7: /mod_base="OTHER" /note="2'-OMe-nucleotide"
  modified_base 8..8: /mod_base="OTHER" /note="2'-fluoro-nucleotide"
  modified_base 9..9: /mod_base="OTHER" /note="2'-OMe-nucleotide"
  modified_base 10..10: /mod_base="OTHER" /note="2'-fluoro-nucleotide"
  modified_base 11..11: /mod_base="OTHER" /note="2'-OMe-nucleotide"
  modified_base 12..12: /mod_base="OTHER" /note="2'-fluoro-nucleotide"
  modified_base 13..13: /mod_base="OTHER" /note="2'-OMe-nucleotide"
  modified_base 14..14: /mod_base="OTHER" /note="2'-fluoro-nucleotide"
  modified_base 15..15: /mod_base="OTHER" /note="2'-OMe-nucleotide"
  modified_base 16..16: /mod_base="OTHER" /note="2'-fluoro-nucleotide"
  modified_base 17..17: /mod_base="OTHER" /note="2'-OMe-nucleotide"
  modified_base 18..18: /mod_base="OTHER" /note="2'-fluoro-nucleotide"
  modified_base 19..19: /mod_base="OTHER" /note="2'-OMe-nucleotide"
  modified_base 20..20: /mod_base="OTHER" /note="dT"
  modified_base 21..21: /mod_base="OTHER" /note="dT"
cuaaaauugauucccacautt

SEQ ID NO: 721 - DNA, 21 bp, Artificial Sequence
  Description of Artificial Sequence: Synthetic oligonucleotide
  Description of Combined DNA/RNA Molecule: Synthetic oligonucleotide
  N-term hydroxyl group
  C-term hydroxyl group
  modified_base 1..1: /mod_base="OTHER" /note="2'-fluoro-nucleotide"
  modified_base 2..2: /mod_base="OTHER" /note="2'-fluoro-nucleotide"
  modified_base 3..3: /mod_base="OTHER" /note="2'-OMe-nucleotide"
  modified_base 4..4: /mod_base="OTHER" /note="2'-fluoro-nucleotide"
  modified_base 5..5: /mod_base="OTHER" /note="2'-OMe-nucleotide"
  modified_base 6..6: /mod_base="OTHER" /note="2'-fluoro-nucleotide"
  modified_base 7..7: /mod_base="OTHER" /note="2'-OMe-nucleotide"
  modified_base 8..8: /mod_base="OTHER" /note="2'-fluoro-nucleotide"
  modified_base 9..9: /mod_base="OTHER" /note="2'-OMe-nucleotide"
  modified_base 10..10: /mod_base="OTHER" /note="2'-fluoro-nucleotide"
  modified_base 11..11: /mod_base="OTHER" /note="2'-OMe-nucleotide"
  modified_base 12..12: /mod_base="OTHER" /note="2'-fluoro-nucleotide"
  modified_base 13..13: /mod_base="OTHER" /note="2'-OMe-nucleotide"
  modified_base 14..14: /mod_base="OTHER" /note="2'-fluoro-nucleotide"
  modified_base 15..15: /mod_base="OTHER" /note="2'-OMe-nucleotide"
  modified_base 16..16: /mod_base="OTHER" /note="2'-fluoro-nucleotide"
  modified_base 17..17: /mod_base="OTHER" /note="2'-OMe-nucleotide"
  modified_base 18..18: /mod_base="OTHER" /note="2'-fluoro-nucleotide"
  modified_base 19..19: /mod_base="OTHER" /note="2'-OMe-nucleotide"
  modified_base 20..20: /mod_base="OTHER" /note="dT"
  modified_base 21..21: /mod_base="OTHER" /note="dT"
ucuaaaauugauucccacatt

SEQ ID NO: 722 - DNA, 21 bp, Artificial Sequence
  Description of Artificial Sequence: Synthetic oligonucleotide
  Description of Combined DNA/RNA Molecule: Synthetic oligonucleotide
  N-term hydroxyl group
  C-term hydroxyl group
  modified_base 1..1: /mod_base="OTHER" /note="2'-fluoro-nucleotide"
  modified_base 2..2: /mod_base="OTHER" /note="2'-fluoro-nucleotide"
  modified_base 3..3: /mod_base="OTHER" /note="2'-OMe-nucleotide"
  modified_base 4..4: /mod_base="OTHER" /note="2'-fluoro-nucleotide"
  modified_base 5..5: /mod_base="OTHER" /note="2'-OMe-nucleotide"
  modified_base 6..6: /mod_base="OTHER" /note="2'-fluoro-nucleotide"
  modified_base 7..7: /mod_base="OTHER" /note="2'-OMe-nucleotide"
  modified_base 8..8: /mod_base="OTHER" /note="2'-fluoro-nucleotide"
  modified_base 9..9: /mod_base="OTHER" /note="2'-OMe-nucleotide"
  modified_base 10..10: /mod_base="OTHER" /note="2'-fluoro-nucleotide"
  modified_base 11..11: /mod_base="OTHER" /note="2'-OMe-nucleotide"
  modified_base 12..12: /mod_base="OTHER" /note="2'-fluoro-nucleotide"
  modified_base 13..13: /mod_base="OTHER" /note="2'-OMe-nucleotide"
  modified_base 14..14: /mod_base="OTHER" /note="2'-fluoro-nucleotide"
  modified_base 15..15: /mod_base="OTHER" /note="2'-OMe-nucleotide"
  modified_base 16..16: /mod_base="OTHER" /note="2'-fluoro-nucleotide"
  modified_base 17..17: /mod_base="OTHER" /note="2'-OMe-nucleotide"
  modified_base 18..18: /mod_base="OTHER" /note="2'-fluoro-nucleotide"
  modified_base 19..19: /mod_base="OTHER" /note="2'-OMe-nucleotide"
  modified_base 20..20: /mod_base="OTHER" /note="dT"
  modified_base 21..21: /mod_base="OTHER" /note="dT"
aucuaaaauugauucccactt

SEQ ID NO: 723 - DNA, 21 bp, Artificial Sequence
  Description of Artificial Sequence: Synthetic oligonucleotide
  Description of Combined DNA/RNA Molecule: Synthetic oligonucleotide
  N-term hydroxyl group
  C-term hydroxyl group
  modified_base 1..1: /mod_base="OTHER" /note="2'-fluoro-nucleotide"
  modified_base 2..2: /mod_base="OTHER" /note="2'-fluoro-nucleotide"
  modified_base 3..3: /mod_base="OTHER" /note="2'-OMe-nucleotide"
  modified_base 4..4: /mod_base="OTHER" /note="2'-fluoro-nucleotide"
  modified_base 5..5: /mod_base="OTHER" /note="2'-OMe-nucleotide"
  modified_base 6..6: /mod_base="OTHER" /note="2'-fluoro-nucleotide"
  modified_base 7..7: /mod_base="OTHER" /note="2'-OMe-nucleotide"
  modified_base 8..8: /mod_base="OTHER" /note="2'-fluoro-nucleotide"
  modified_base 9..9: /mod_base="OTHER" /note="2'-OMe-nucleotide"
  modified_base 10..10: /mod_base="OTHER" /note="2'-fluoro-nucleotide"
  modified_base 11..11: /mod_base="OTHER" /note="2'-OMe-nucleotide"
  modified_base 12..12: /mod_base="OTHER" /note="2'-fluoro-nucleotide"
  modified_base 13..13: /mod_base="OTHER" /note="2'-OMe-nucleotide"
  modified_base 14..14: /mod_base="OTHER" /note="2'-fluoro-nucleotide"
  modified_base 15..15: /mod_base="OTHER" /note="2'-OMe-nucleotide"
  modified_base 16..16: /mod_base="OTHER" /note="2'-fluoro-nucleotide"
  modified_base 17..17: /mod_base="OTHER" /note="2'-OMe-nucleotide"
  modified_base 18..18: /mod_base="OTHER" /note="2'-fluoro-nucleotide"
  modified_base 19..19: /mod_base="OTHER" /note="2'-OMe-nucleotide"
  modified_base 20..20: /mod_base="OTHER" /note="dT"
  modified_base 21..21: /mod_base="OTHER" /note="dT"
caucuaaaauugauucccatt

SEQ ID NO: 724 - DNA, 21 bp, Artificial Sequence
  Description of Artificial Sequence: Synthetic oligonucleotide
  Description of Combined DNA/RNA Molecule: Synthetic oligonucleotide
  N-term hydroxyl group
  C-term hydroxyl group
  modified_base 1..1: /mod_base="OTHER" /note="2'-fluoro-nucleotide"
  modified_base 2..2: /mod_base="OTHER" /note="2'-fluoro-nucleotide"
  modified_base 3..3: /mod_base="OTHER" /note="2'-OMe-nucleotide"
  modified_base 4..4: /mod_base="OTHER" /note="2'-fluoro-nucleotide"
  modified_base 5..5: /mod_base="OTHER" /note="2'-OMe-nucleotide"
  modified_base 6..6: /mod_base="OTHER" /note="2'-fluoro-nucleotide"
  modified_base 7..7: /mod_base="OTHER" /note="2'-OMe-nucleotide"
  modified_base 8..8: /mod_base="OTHER" /note="2'-fluoro-nucleotide"
  modified_base 9..9: /mod_base="OTHER" /note="2'-OMe-nucleotide"
  modified_base 10..10: /mod_base="OTHER" /note="2'-fluoro-nucleotide"
  modified_base 11..11: /mod_base="OTHER" /note="2'-OMe-nucleotide"
  modified_base 12..12: /mod_base="OTHER" /note="2'-fluoro-nucleotide"
  modified_base 13..13: /mod_base="OTHER" /note="2'-OMe-nucleotide"
  modified_base 14..14: /mod_base="OTHER" /note="2'-fluoro-nucleotide"
  modified_base 15..15: /mod_base="OTHER" /note="2'-OMe-nucleotide"
  modified_base 16..16: /mod_base="OTHER" /note="2'-fluoro-nucleotide"
  modified_base 17..17: /mod_base="OTHER" /note="2'-OMe-nucleotide"
  modified_base 18..18: /mod_base="OTHER" /note="2'-fluoro-nucleotide"
  modified_base 19..19: /mod_base="OTHER" /note="2'-OMe-nucleotide"
  modified_base 20..20: /mod_base="OTHER" /note="dT"
  modified_base 21..21: /mod_base="OTHER" /note="dT"
ccaucuaaaauugauuccctt

SEQ ID NO: 725 - DNA, 21 bp, Artificial Sequence
  Description of Artificial Sequence: Synthetic oligonucleotide
  Description of Combined DNA/RNA Molecule: Synthetic oligonucleotide
  N-term hydroxyl group
  C-term hydroxyl group
  modified_base 1..1: /mod_base="OTHER" /note="2'-fluoro-nucleotide"
  modified_base 2..2: /mod_base="OTHER" /note="2'-fluoro-nucleotide"
  modified_base 3..3: /mod_base="OTHER" /note="2'-OMe-nucleotide"
  modified_base 4..4: /mod_base="OTHER" /note="2'-fluoro-nucleotide"
  modified_base 5..5: /mod_base="OTHER" /note="2'-OMe-nucleotide"
  modified_base 6..6: /mod_base="OTHER" /note="2'-fluoro-nucleotide"
  modified_base 7..7: /mod_base="OTHER" /note="2'-OMe-nucleotide"
  modified_base 8..8: /mod_base="OTHER" /note="2'-fluoro-nucleotide"
  modified_base 9..9: /mod_base="OTHER" /note="2'-OMe-nucleotide"
  modified_base 10..10: /mod_base="OTHER" /note="2'-fluoro-nucleotide"
  modified_base 11..11: /mod_base="OTHER" /note="2'-OMe-nucleotide"
  modified_base 12..12: /mod_base="OTHER" /note="2'-fluoro-nucleotide"
  modified_base 13..13: /mod_base="OTHER" /note="2'-OMe-nucleotide"
  modified_base 14..14: /mod_base="OTHER" /note="2'-fluoro-nucleotide"
  modified_base 15..15: /mod_base="OTHER" /note="2'-OMe-nucleotide"
  modified_base 16..16: /mod_base="OTHER" /note="2'-fluoro-nucleotide"
  modified_base 17..17: /mod_base="OTHER" /note="2'-OMe-nucleotide"
  modified_base 18..18: /mod_base="OTHER" /note="2'-fluoro-nucleotide"
  modified_base 19..19: /mod_base="OTHER" /note="2'-OMe-nucleotide"
  modified_base 20..20: /mod_base="OTHER" /note="dT"
  modified_base 21..21: /mod_base="OTHER" /note="dT"
accaucuaaaauugauucctt

SEQ ID NO: 726 - DNA, 21 bp, Artificial Sequence
  Description of Artificial Sequence: Synthetic oligonucleotide
  Description of Combined DNA/RNA Molecule: Synthetic oligonucleotide
  N-term hydroxyl group
  C-term hydroxyl group
  modified_base 1..1: /mod_base="OTHER" /note="2'-fluoro-nucleotide"
  modified_base 2..2: /mod_base="OTHER" /note="2'-fluoro-nucleotide"
  modified_base 3..3: /mod_base="OTHER" /note="2'-OMe-nucleotide"
  modified_base 4..4: /mod_base="OTHER" /note="2'-fluoro-nucleotide"
  modified_base 5..5: /mod_base="OTHER" /note="2'-OMe-nucleotide"
  modified_base 6..6: /mod_base="OTHER" /note="2'-fluoro-nucleotide"
  modified_base 7..7: /mod_base="OTHER" /note="2'-OMe-nucleotide"
  modified_base 8..8: /mod_base="OTHER" /note="2'-fluoro-nucleotide"
  modified_base 9..9: /mod_base="OTHER" /note="2'-OMe-nucleotide"
  modified_base 10..10: /mod_base="OTHER" /note="2'-fluoro-nucleotide"
  modified_base 11..11: /mod_base="OTHER" /note="2'-OMe-nucleotide"
  modified_base 12..12: /mod_base="OTHER" /note="2'-fluoro-nucleotide"
  modified_base 13..13: /mod_base="OTHER" /note="2'-OMe-nucleotide"
  modified_base 14..14: /mod_base="OTHER" /note="2'-fluoro-nucleotide"
  modified_base 15..15: /mod_base="OTHER" /note="2'-OMe-nucleotide"
  modified_base 16..16: /mod_base="OTHER" /note="2'-fluoro-nucleotide"
  modified_base 17..17: /mod_base="OTHER" /note="2'-OMe-nucleotide"
  modified_base 18..18: /mod_base="OTHER" /note="2'-fluoro-nucleotide"
  modified_base 19..19: /mod_base="OTHER" /note="2'-OMe-nucleotide"
  modified_base 20..20: /mod_base="OTHER" /note="dT"
  modified_base 21..21: /mod_base="OTHER" /note="dT"
gaccaucuaaaauugauuctt

SEQ ID NO: 727 - DNA, 21 bp, Artificial Sequence
  Description of Artificial Sequence: Synthetic oligonucleotide
  Description of Combined DNA/RNA Molecule: Synthetic oligonucleotide
  N-term hydroxyl group
  C-term hydroxyl group
  modified_base 1..1: /mod_base="OTHER" /note="2'-fluoro-nucleotide"
  modified_base 2..2: /mod_base="OTHER" /note="2'-fluoro-nucleotide"
  modified_base 3..3: /mod_base="OTHER" /note="2'-OMe-nucleotide"
  modified_base 4..4: /mod_base="OTHER" /note="2'-fluoro-nucleotide"
  modified_base 5..5: /mod_base="OTHER" /note="2'-OMe-nucleotide"
  modified_base 6..6: /mod_base="OTHER" /note="2'-fluoro-nucleotide"
  modified_base 7..7: /mod_base="OTHER" /note="2'-OMe-nucleotide"
  modified_base 8..8: /mod_base="OTHER" /note="2'-fluoro-nucleotide"
  modified_base 9..9: /mod_base="OTHER" /note="2'-OMe-nucleotide"
  modified_base 10..10: /mod_base="OTHER" /note="2'-fluoro-nucleotide"
  modified_base 11..11: /mod_base="OTHER" /note="2'-OMe-nucleotide"
  modified_base 12..12: /mod_base="OTHER" /note="2'-fluoro-nucleotide"
  modified_base 13..13: /mod_base="OTHER" /note="2'-OMe-nucleotide"
  modified_base 14..14: /mod_base="OTHER" /note="2'-fluoro-nucleotide"
  modified_base 15..15: /mod_base="OTHER" /note="2'-OMe-nucleotide"
  modified_base 16..16: /mod_base="OTHER" /note="2'-fluoro-nucleotide"
  modified_base 17..17: /mod_base="OTHER" /note="2'-OMe-nucleotide"
  modified_base 18..18: /mod_base="OTHER" /note="2'-fluoro-nucleotide"
  modified_base 19..19: /mod_base="OTHER" /note="2'-OMe-nucleotide"
  modified_base 20..20: /mod_base="OTHER" /note="dT"
  modified_base 21..21: /mod_base="OTHER" /note="dT"
gauauuagcucauaugaugtt

SEQ ID NO: 728 - DNA, 21 bp, Artificial Sequence
  Description of Artificial Sequence: Synthetic oligonucleotide
  Description of Combined DNA/RNA Molecule: Synthetic oligonucleotide
  N-term hydroxyl group
  C-term hydroxyl group
  modified_base 1..1: /mod_base="OTHER" /note="2'-fluoro-nucleotide"
  modified_base 2..2: /mod_base="OTHER" /note="2'-fluoro-nucleotide"
  modified_base 3..3: /mod_base="OTHER" /note="2'-OMe-nucleotide"
  modified_base 4..4: /mod_base="OTHER" /note="2'-fluoro-nucleotide"
  modified_base 5..5: /mod_base="OTHER" /note="2'-OMe-nucleotide"
  modified_base 6..6: /mod_base="OTHER" /note="2'-fluoro-nucleotide"
  modified_base 7..7: /mod_base="OTHER" /note="2'-OMe-nucleotide"
  modified_base 8..8: /mod_base="OTHER" /note="2'-fluoro-nucleotide"
  modified_base 9..9: /mod_base="OTHER" /note="2'-OMe-nucleotide"
  modified_base 10..10: /mod_base="OTHER" /note="2'-fluoro-nucleotide"
  modified_base 11..11: /mod_base="OTHER" /note="2'-OMe-nucleotide"
  modified_base 12..12: /mod_base="OTHER" /note="2'-fluoro-nucleotide"
  modified_base 13..13: /mod_base="OTHER" /note="2'-OMe-nucleotide"
  modified_base 14..14: /mod_base="OTHER" /note="2'-fluoro-nucleotide"
  modified_base 15..15: /mod_base="OTHER" /note="2'-OMe-nucleotide"
  modified_base 16..16: /mod_base="OTHER" /note="2'-fluoro-nucleotide"
  modified_base 17..17: /mod_base="OTHER" /note="2'-OMe-nucleotide"
  modified_base 18..18: /mod_base="OTHER" /note="2'-fluoro-nucleotide"
  modified_base 19..19: /mod_base="OTHER" /note="2'-OMe-nucleotide"
  modified_base 20..20: /mod_base="OTHER" /note="dT"
  modified_base 21..21: /mod_base="OTHER" /note="dT"
ugauauuagcucauaugautt

SEQ ID NO: 729 - DNA, 21 bp, Artificial Sequence
  Description of Artificial Sequence: Synthetic oligonucleotide
  Description of Combined DNA/RNA Molecule: Synthetic oligonucleotide
  N-term hydroxyl group
  C-term hydroxyl group
  modified_base 1..1: /mod_base="OTHER" /note="2'-fluoro-nucleotide"
  modified_base 2..2: /mod_base="OTHER" /note="2'-fluoro-nucleotide"
  modified_base 3..3: /mod_base="OTHER" /note="2'-OMe-nucleotide"
  modified_base 4..4: /mod_base="OTHER" /note="2'-fluoro-nucleotide"
  modified_base 5..5: /mod_base="OTHER" /note="2'-OMe-nucleotide"
  modified_base 6..6: /mod_base="OTHER" /note="2'-fluoro-nucleotide"
  modified_base 7..7: /mod_base="OTHER" /note="2'-OMe-nucleotide"
  modified_base 8..8: /mod_base="OTHER" /note="2'-fluoro-nucleotide"
  modified_base 9..9: /mod_base="OTHER" /note="2'-OMe-nucleotide"
  modified_base 10..10: /mod_base="OTHER" /note="2'-fluoro-nucleotide"
  modified_base 11..11: /mod_base="OTHER" /note="2'-OMe-nucleotide"
  modified_base 12..12: /mod_base="OTHER" /note="2'-fluoro-nucleotide"
  modified_base 13..13: /mod_base="OTHER" /note="2'-OMe-nucleotide"
  modified_base 14..14: /mod_base="OTHER" /note="2'-fluoro-nucleotide"
  modified_base 15..15: /mod_base="OTHER" /note="2'-OMe-nucleotide"
  modified_base 16..16: /mod_base="OTHER" /note="2'-fluoro-nucleotide"
  modified_base 17..17: /mod_base="OTHER" /note="2'-OMe-nucleotide"
  modified_base 18..18: /mod_base="OTHER" /note="2'-fluoro-nucleotide"
  modified_base 19..19: /mod_base="OTHER" /note="2'-OMe-nucleotide"
  modified_base 20..20: /mod_base="OTHER" /note="dT"
  modified_base 21..21: /mod_base="OTHER" /note="dT"
gugauauuagcucauaugatt

SEQ ID NO: 730 - DNA, 21 bp, Artificial Sequence
  Description of Artificial Sequence: Synthetic oligonucleotide
  Description of Combined DNA/RNA Molecule: Synthetic oligonucleotide
  N-term hydroxyl group
  C-term hydroxyl group
  modified_base 1..1: /mod_base="OTHER" /note="2'-fluoro-nucleotide"
  modified_base 2..2: /mod_base="OTHER" /note="2'-fluoro-nucleotide"
  modified_base 3..3: /mod_base="OTHER" /note="2'-OMe-nucleotide"
  modified_base 4..4: /mod_base="OTHER" /note="2'-fluoro-nucleotide"
  modified_base 5..5: /mod_base="OTHER" /note="2'-OMe-nucleotide"
  modified_base 6..6: /mod_base="OTHER" /note="2'-fluoro-nucleotide"
  modified_base 7..7: /mod_base="OTHER" /note="2'-OMe-nucleotide"
  modified_base 8..8: /mod_base="OTHER" /note="2'-fluoro-nucleotide"
  modified_base 9..9: /mod_base="OTHER" /note="2'-OMe-nucleotide"
  modified_base 10..10: /mod_base="OTHER" /note="2'-fluoro-nucleotide"
  modified_base 11..11: /mod_base="OTHER" /note="2'-OMe-nucleotide"
  modified_base 12..12: /mod_base="OTHER" /note="2'-fluoro-nucleotide"
  modified_base 13..13: /mod_base="OTHER" /note="2'-OMe-nucleotide"
  modified_base 14..14: /mod_base="OTHER" /note="2'-fluoro-nucleotide"
  modified_base 15..15: /mod_base="OTHER" /note="2'-OMe-nucleotide"
  modified_base 16..16: /mod_base="OTHER" /note="2'-fluoro-nucleotide"
  modified_base 17..17: /mod_base="OTHER" /note="2'-OMe-nucleotide"
  modified_base 18..18: /mod_base="OTHER" /note="2'-fluoro-nucleotide"
  modified_base 19..19: /mod_base="OTHER" /note="2'-OMe-nucleotide"
  modified_base 20..20: /mod_base="OTHER" /note="dT"
  modified_base 21..21: /mod_base="OTHER" /note="dT"
ugugauauuagcucauaugtt

SEQ ID NO: 731 - DNA, 21 bp, Artificial Sequence
  Description of Artificial Sequence: Synthetic oligonucleotide
  Description of Combined DNA/RNA Molecule: Synthetic oligonucleotide
  N-term hydroxyl group
  C-term hydroxyl group
  modified_base 1..1: /mod_base="OTHER" /note="2'-fluoro-nucleotide"
  modified_base 2..2: /mod_base="OTHER" /note="2'-fluoro-nucleotide"
  modified_base 3..3: /mod_base="OTHER" /note="2'-OMe-nucleotide"
  modified_base 4..4: /mod_base="OTHER" /note="2'-fluoro-nucleotide"
  modified_base 5..5: /mod_base="OTHER" /note="2'-OMe-nucleotide"
  modified_base 6..6: /mod_base="OTHER" /note="2'-fluoro-nucleotide"
  modified_base 7..7: /mod_base="OTHER" /note="2'-OMe-nucleotide"
  modified_base 8..8: /mod_base="OTHER" /note="2'-fluoro-nucleotide"
  modified_base 9..9: /mod_base="OTHER" /note="2'-OMe-nucleotide"
  modified_base 10..10: /mod_base="OTHER" /note="2'-fluoro-nucleotide"
  modified_base 11..11: /mod_base="OTHER" /note="2'-OMe-nucleotide"
  modified_base 12..12: /mod_base="OTHER" /note="2'-fluoro-nucleotide"
  modified_base 13..13: /mod_base="OTHER" /note="2'-OMe-nucleotide"
  modified_base 14..14: /mod_base="OTHER" /note="2'-fluoro-nucleotide"
  modified_base 15..15: /mod_base="OTHER" /note="2'-OMe-nucleotide"
  modified_base 16..16: /mod_base="OTHER" /note="2'-fluoro-nucleotide"
  modified_base 17..17: /mod_base="OTHER" /note="2'-OMe-nucleotide"
  modified_base 18..18: /mod_base="OTHER" /note="2'-fluoro-nucleotide"
  modified_base 19..19: /mod_base="OTHER" /note="2'-OMe-nucleotide"
  modified_base 20..20: /mod_base="OTHER" /note="dT"
  modified_base 21..21: /mod_base="OTHER" /note="dT"
uugugauauuagcucauautt

SEQ ID NO: 732 - DNA, 21 bp, Artificial Sequence
  Description of Artificial Sequence: Synthetic oligonucleotide
  Description of Combined DNA/RNA Molecule: Synthetic oligonucleotide
  N-term hydroxyl group
  C-term hydroxyl group
  modified_base 1..1: /mod_base="OTHER" /note="2'-fluoro-nucleotide"
  modified_base 2..2: /mod_base="OTHER" /note="2'-fluoro-nucleotide"
  modified_base 3..3: /mod_base="OTHER" /note="2'-OMe-nucleotide"
  modified_base 4..4: /mod_base="OTHER" /note="2'-fluoro-nucleotide"
  modified_base 5..5: /mod_base="OTHER" /note="2'-OMe-nucleotide"
  modified_base 6..6: /mod_base="OTHER" /note="2'-fluoro-nucleotide"
  modified_base 7..7: /mod_base="OTHER" /note="2'-OMe-nucleotide"
  modified_base 8..8: /mod_base="OTHER" /note="2'-fluoro-nucleotide"
  modified_base 9..9: /mod_base="OTHER" /note="2'-OMe-nucleotide"
  modified_base 10..10: /mod_base="OTHER" /note="2'-fluoro-nucleotide"
  modified_base 11..11: /mod_base="OTHER" /note="2'-OMe-nucleotide"
  modified_base 12..12: /mod_base="OTHER" /note="2'-fluoro-nucleotide"
  modified_base 13..13: /mod_base="OTHER" /note="2'-OMe-nucleotide"
  modified_base 14..14: /mod_base="OTHER" /note="2'-fluoro-nucleotide"
  modified_base 15..15: /mod_base="OTHER" /note="2'-OMe-nucleotide"
  modified_base 16..16: /mod_base="OTHER" /note="2'-fluoro-nucleotide"
  modified_base 17..17: /mod_base="OTHER" /note="2'-OMe-nucleotide"
  modified_base 18..18: /mod_base="OTHER" /note="2'-fluoro-nucleotide"
  modified_base 19..19: /mod_base="OTHER" /note="2'-OMe-nucleotide"
  modified_base 20..20: /mod_base="OTHER" /note="dT"
  modified_base 21..21: /mod_base="OTHER" /note="dT"
acuaguuuuuuaaacugggtt

SEQ ID NO: 733 - DNA, 21 bp, Artificial Sequence
  Description of Artificial Sequence: Synthetic oligonucleotide
  Description of Combined DNA/RNA Molecule: Synthetic oligonucleotide
  N-term hydroxyl group
  C-term hydroxyl group
  modified_base 1..1: /mod_base="OTHER" /note="2'-fluoro-nucleotide"
  modified_base 2..2: /mod_base="OTHER" /note="2'-fluoro-nucleotide"
  modified_base 3..3: /mod_base="OTHER" /note="2'-OMe-nucleotide"
  modified_base 4..4: /mod_base="OTHER" /note="2'-fluoro-nucleotide"
  modified_base 5..5: /mod_base="OTHER" /note="2'-OMe-nucleotide"
  modified_base 6..6: /mod_base="OTHER" /note="2'-fluoro-nucleotide"
  modified_base 7..7: /mod_base="OTHER" /note="2'-OMe-nucleotide"
  modified_base 8..8: /mod_base="OTHER" /note="2'-fluoro-nucleotide"
  modified_base 9..9: /mod_base="OTHER" /note="2'-OMe-nucleotide"
  modified_base 10..10: /mod_base="OTHER" /note="2'-fluoro-nucleotide"
  modified_base 11..11: /mod_base="OTHER" /note="2'-OMe-nucleotide"
  modified_base 12..12: /mod_base="OTHER" /note="2'-fluoro-nucleotide"
  modified_base 13..13: /mod_base="OTHER" /note="2'-OMe-nucleotide"
  modified_base 14..14: /mod_base="OTHER" /note="2'-fluoro-nucleotide"
  modified_base 15..15: /mod_base="OTHER" /note="2'-OMe-nucleotide"
  modified_base 16..16: /mod_base="OTHER" /note="2'-fluoro-nucleotide"
  modified_base 17..17: /mod_base="OTHER" /note="2'-OMe-nucleotide"
  modified_base 18..18: /mod_base="OTHER" /note="2'-fluoro-nucleotide"
  modified_base 19..19: /mod_base="OTHER" /note="2'-OMe-nucleotide"
  modified_base 20..20: /mod_base="OTHER" /note="dT"
  modified_base 21..21: /mod_base="OTHER" /note="dT"
agucaaguuuagaguuuuatt

SEQ ID NO: 734 - DNA, 21 bp, Artificial Sequence
  Description of Artificial Sequence: Synthetic oligonucleotide
  Description of Combined DNA/RNA Molecule: Synthetic oligonucleotide
  N-term hydroxyl group
  C-term hydroxyl group
  modified_base 1..1: /mod_base="OTHER" /note="2'-fluoro-nucleotide"
  modified_base 2..2: /mod_base="OTHER" /note="2'-fluoro-nucleotide"
  modified_base 3..3: /mod_base="OTHER" /note="2'-OMe-nucleotide"
  modified_base 4..4: /mod_base="OTHER" /note="2'-fluoro-nucleotide"
  modified_base 5..5: /mod_base="OTHER" /note="2'-OMe-nucleotide"
  modified_base 6..6: /mod_base="OTHER" /note="2'-fluoro-nucleotide"
  modified_base 7..7: /mod_base="OTHER" /note="2'-OMe-nucleotide"
  modified_base 8..8: /mod_base="OTHER" /note="2'-fluoro-nucleotide"
  modified_base 9..9: /mod_base="OTHER" /note="2'-OMe-nucleotide"
  modified_base 10..10: /mod_base="OTHER" /note="2'-fluoro-nucleotide"
  modified_base 11..11: /mod_base="OTHER" /note="2'-OMe-nucleotide"
  modified_base 12..12: /mod_base="OTHER" /note="2'-fluoro-nucleotide"
  modified_base 13..13: /mod_base="OTHER" /note="2'-OMe-nucleotide"
  modified_base 14..14: /mod_base="OTHER" /note="2'-fluoro-nucleotide"
  modified_base 15..15: /mod_base="OTHER" /note="2'-OMe-nucleotide"
  modified_base 16..16: /mod_base="OTHER" /note="2'-fluoro-nucleotide"
  modified_base 17..17: /mod_base="OTHER" /note="2'-OMe-nucleotide"
  modified_base 18..18: /mod_base="OTHER" /note="2'-fluoro-nucleotide"
  modified_base 19..19: /mod_base="OTHER" /note="2'-OMe-nucleotide"
  modified_base 20..20: /mod_base="OTHER" /note="dT"
  modified_base 21..21: /mod_base="OTHER" /note="dT"
uagucaaguuuagaguuuutt

SEQ ID NO: 735 - DNA, 21 bp, Artificial Sequence
  Description of Artificial Sequence: Synthetic oligonucleotide
  Description of Combined DNA/RNA Molecule: Synthetic oligonucleotide
  N-term hydroxyl group
  C-term hydroxyl group
  modified_base 1..1: /mod_base="OTHER" /note="2'-fluoro-nucleotide"
  modified_base 2..2: /mod_base="OTHER" /note="2'-fluoro-nucleotide"
  modified_base 3..3: /mod_base="OTHER" /note="2'-OMe-nucleotide"
  modified_base 4..4: /mod_base="OTHER" /note="2'-fluoro-nucleotide"
  modified_base 5..5: /mod_base="OTHER" /note="2'-OMe-nucleotide"
  modified_base 6..6: /mod_base="OTHER" /note="2'-fluoro-nucleotide"
  modified_base 7..7: /mod_base="OTHER" /note="2'-OMe-nucleotide"
  modified_base 8..8: /mod_base="OTHER" /note="2'-fluoro-nucleotide"
  modified_base 9..9: /mod_base="OTHER" /note="2'-OMe-nucleotide"
  modified_base 10..10: /mod_base="OTHER" /note="2'-fluoro-nucleotide"
  modified_base 11..11: /mod_base="OTHER" /note="2'-OMe-nucleotide"
  modified_base 12..12: /mod_base="OTHER" /note="2'-fluoro-nucleotide"
  modified_base 13..13: /mod_base="OTHER" /note="2'-OMe-nucleotide"
  modified_base 14..14: /mod_base="OTHER" /note="2'-fluoro-nucleotide"
  modified_base 15..15: /mod_base="OTHER" /note="2'-OMe-nucleotide"
  modified_base 16..16: /mod_base="OTHER" /note="2'-fluoro-nucleotide"
  modified_base 17..17: /mod_base="OTHER" /note="2'-OMe-nucleotide"
  modified_base 18..18: /mod_base="OTHER" /note="2'-fluoro-nucleotide"
  modified_base 19..19: /mod_base="OTHER" /note="2'-OMe-nucleotide"
  modified_base 20..20: /mod_base="OTHER" /note="dT"
  modified_base 21..21: /mod_base="OTHER" /note="dT"
uuagucaaguuuagaguuutt

SEQ ID NO: 736 - DNA, 21 bp, Artificial Sequence
  Description of Artificial Sequence: Synthetic oligonucleotide
  Description of Combined DNA/RNA Molecule: Synthetic oligonucleotide
  N-term hydroxyl group
  C-term hydroxyl group
  modified_base 1..1: /mod_base="OTHER" /note="2'-fluoro-nucleotide"
  modified_base 2..2: /mod_base="OTHER" /note="2'-fluoro-nucleotide"
  modified_base 3..3: /mod_base="OTHER" /note="2'-OMe-nucleotide"
  modified_base 4..4: /mod_base="OTHER" /note="2'-fluoro-nucleotide"
  modified_base 5..5: /mod_base="OTHER" /note="2'-OMe-nucleotide"
  modified_base 6..6: /mod_base="OTHER" /note="2'-fluoro-nucleotide"
  modified_base 7..7: /mod_base="OTHER" /note="2'-OMe-nucleotide"
  modified_base 8..8: /mod_base="OTHER" /note="2'-fluoro-nucleotide"
  modified_base 9..9: /mod_base="OTHER" /note="2'-OMe-nucleotide"
  modified_base 10..10: /mod_base="OTHER" /note="2'-fluoro-nucleotide"
  modified_base 11..11: /mod_base="OTHER" /note="2'-OMe-nucleotide"
  modified_base 12..12: /mod_base="OTHER" /note="2'-fluoro-nucleotide"
  modified_base 13..13: /mod_base="OTHER" /note="2'-OMe-nucleotide"
  modified_base 14..14: /mod_base="OTHER" /note="2'-fluoro-nucleotide"
  modified_base 15..15: /mod_base="OTHER" /note="2'-OMe-nucleotide"
  modified_base 16..16: /mod_base="OTHER" /note="2'-fluoro-nucleotide"
  modified_base 17..17: /mod_base="OTHER" /note="2'-OMe-nucleotide"
  modified_base 18..18: /mod_base="OTHER" /note="2'-fluoro-nucleotide"
  modified_base 19..19: /mod_base="OTHER" /note="2'-OMe-nucleotide"
  modified_base 20..20: /mod_base="OTHER" /note="dT"
  modified_base 21..21: /mod_base="OTHER" /note="dT"
auuuagucaaguuuagagutt

SEQ ID NO: 737 - DNA, 21 bp, Artificial Sequence
  Description of Artificial Sequence: Synthetic oligonucleotide
  Description of Combined DNA/RNA Molecule: Synthetic oligonucleotide
  N-term hydroxyl group
  C-term hydroxyl group
  modified_base 1..1: /mod_base="OTHER" /note="2'-fluoro-nucleotide"
  modified_base 2..2: /mod_base="OTHER" /note="2'-fluoro-nucleotide"
  modified_base 3..3: /mod_base="OTHER" /note="2'-OMe-nucleotide"
  modified_base 4..4: /mod_base="OTHER" /note="2'-fluoro-nucleotide"
  modified_base 5..5: /mod_base="OTHER" /note="2'-OMe-nucleotide"
  modified_base 6..6: /mod_base="OTHER" /note="2'-fluoro-nucleotide"
  modified_base 7..7: /mod_base="OTHER" /note="2'-OMe-nucleotide"
  modified_base 8..8: /mod_base="OTHER" /note="2'-fluoro-nucleotide"
  modified_base 9..9: /mod_base="OTHER" /note="2'-OMe-nucleotide"
  modified_base 10..10: /mod_base="OTHER" /note="2'-fluoro-nucleotide"
  modified_base 11..11: /mod_base="OTHER" /note="2'-OMe-nucleotide"
  modified_base 12..12: /mod_base="OTHER" /note="2'-fluoro-nucleotide"
  modified_base 13..13: /mod_base="OTHER" /note="2'-OMe-nucleotide"
  modified_base 14..14: /mod_base="OTHER" /note="2'-fluoro-nucleotide"
  modified_base 15..15: /mod_base="OTHER" /note="2'-OMe-nucleotide"
  modified_base 16..16: /mod_base="OTHER" /note="2'-fluoro-nucleotide"
  modified_base 17..17: /mod_base="OTHER" /note="2'-OMe-nucleotide"
  modified_base 18..18: /mod_base="OTHER" /note="2'-fluoro-nucleotide"
  modified_base 19..19: /mod_base="OTHER" /note="2'-OMe-nucleotide"
  modified_base 20..20: /mod_base="OTHER" /note="dT"
  modified_base 21..21: /mod_base="OTHER" /note="dT"
uauuuagucaaguuuagagtt

SEQ ID NO: 738 - DNA, 21 bp, Artificial Sequence
  Description of Artificial Sequence: Synthetic oligonucleotide
  Description of Combined DNA/RNA Molecule: Synthetic oligonucleotide
  N-term hydroxyl group
  C-term hydroxyl group
  modified_base 1..1: /mod_base="OTHER" /note="2'-fluoro-nucleotide"
  modified_base 2..2: /mod_base="OTHER" /note="2'-fluoro-nucleotide"
  modified_base 3..3: /mod_base="OTHER" /note="2'-OMe-nucleotide"
  modified_base 4..4: /mod_base="OTHER" /note="2'-fluoro-nucleotide"
  modified_base 5..5: /mod_base="OTHER" /note="2'-OMe-nucleotide"
  modified_base 6..6: /mod_base="OTHER" /note="2'-fluoro-nucleotide"
  modified_base 7..7: /mod_base="OTHER" /note="2'-OMe-nucleotide"
  modified_base 8..8: /mod_base="OTHER" /note="2'-fluoro-nucleotide"
  modified_base 9..9: /mod_base="OTHER" /note="2'-OMe-nucleotide"
  modified_base 10..10: /mod_base="OTHER" /note="2'-fluoro-nucleotide"
  modified_base 11..11: /mod_base="OTHER" /note="2'-OMe-nucleotide"
  modified_base 12..12: /mod_base="OTHER" /note="2'-fluoro-nucleotide"
  modified_base 13..13: /mod_base="OTHER" /note="2'-OMe-nucleotide"
  modified_base 14..14: /mod_base="OTHER" /note="2'-fluoro-nucleotide"
  modified_base 15..15: /mod_base="OTHER" /note="2'-OMe-nucleotide"
  modified_base 16..16: /mod_base="OTHER" /note="2'-fluoro-nucleotide"
  modified_base 17..17: /mod_base="OTHER" /note="2'-OMe-nucleotide"
  modified_base 18..18: /mod_base="OTHER" /note="2'-fluoro-nucleotide"
  modified_base 19..19: /mod_base="OTHER" /note="2'-OMe-nucleotide"
  modified_base 20..20: /mod_base="OTHER" /note="dT"
  modified_base 21..21: /mod_base="OTHER" /note="dT"
acacauacucugugcugactt

SEQ ID NO: 739 - DNA, 21 bp, Artificial Sequence
  Description of Artificial Sequence: Synthetic oligonucleotide
  Description of Combined DNA/RNA Molecule: Synthetic oligonucleotide
  N-term hydroxyl group
  C-term hydroxyl group
  modified_base 1..1: /mod_base="OTHER" /note="2'-fluoro-nucleotide"
  modified_base 2..2: /mod_base="OTHER" /note="2'-fluoro-nucleotide"
  modified_base 3..3: /mod_base="OTHER" /note="2'-OMe-nucleotide"
  modified_base 4..4: /mod_base="OTHER" /note="2'-fluoro-nucleotide"
  modified_base 5..5: /mod_base="OTHER" /note="2'-OMe-nucleotide"
  modified_base 6..6: /mod_base="OTHER" /note="2'-fluoro-nucleotide"
  modified_base 7..7: /mod_base="OTHER" /note="2'-OMe-nucleotide"
  modified_base 8..8: /mod_base="OTHER" /note="2'-fluoro-nucleotide"
  modified_base 9..9: /mod_base="OTHER" /note="2'-OMe-nucleotide"
  modified_base 10..10: /mod_base="OTHER" /note="2'-fluoro-nucleotide"
  modified_base 11..11: /mod_base="OTHER" /note="2'-OMe-nucleotide"
  modified_base 12..12: /mod_base="OTHER" /note="2'-fluoro-nucleotide"
  modified_base 13..13: /mod_base="OTHER" /note="2'-OMe-nucleotide"
  modified_base 14..14: /mod_base="OTHER" /note="2'-fluoro-nucleotide"
  modified_base 15..15: /mod_base="OTHER" /note="2'-OMe-nucleotide"
  modified_base 16..16: /mod_base="OTHER" /note="2'-fluoro-nucleotide"
  modified_base 17..17: /mod_base="OTHER" /note="2'-OMe-nucleotide"
  modified_base 18..18: /mod_base="OTHER" /note="2'-fluoro-nucleotide"
  modified_base 19..19: /mod_base="OTHER" /note="2'-OMe-nucleotide"
  modified_base 20..20: /mod_base="OTHER" /note="dT"
  modified_base 21..21: /mod_base="OTHER" /note="dT"
uagguuucauaaauaaauctt

SEQ ID NO: 740 - DNA, 21 bp, Artificial Sequence
  Description of Artificial Sequence: Synthetic oligonucleotide
  Description of Combined DNA/RNA Molecule: Synthetic oligonucleotide
  N-term hydroxyl group
  C-term hydroxyl group
  modified_base 1..1: /mod_base="OTHER" /note="2'-fluoro-nucleotide"
  modified_base 2..2: /mod_base="OTHER" /note="2'-fluoro-nucleotide"
  modified_base 3..3: /mod_base="OTHER" /note="2'-OMe-nucleotide"
  modified_base 4..4: /mod_base="OTHER" /note="2'-fluoro-nucleotide"
  modified_base 5..5: /mod_base="OTHER" /note="2'-OMe-nucleotide"
  modified_base 6..6: /mod_base="OTHER" /note="2'-fluoro-nucleotide"
  modified_base 7..7: /mod_base="OTHER" /note="2'-OMe-nucleotide"
  modified_base 8..8: /mod_base="OTHER" /note="2'-fluoro-nucleotide"
  modified_base 9..9: /mod_base="OTHER" /note="2'-OMe-nucleotide"
  modified_base 10..10: /mod_base="OTHER" /note="2'-fluoro-nucleotide"
  modified_base 11..11: /mod_base="OTHER" /note="2'-OMe-nucleotide"
  modified_base 12..12: /mod_base="OTHER" /note="2'-fluoro-nucleotide"
  modified_base 13..13: /mod_base="OTHER" /note="2'-OMe-nucleotide"
  modified_base 14..14: /mod_base="OTHER" /note="2'-fluoro-nucleotide"
  modified_base 15..15: /mod_base="OTHER" /note="2'-OMe-nucleotide"
  modified_base 16..16: /mod_base="OTHER" /note="2'-fluoro-nucleotide"
  modified_base 17..17: /mod_base="OTHER" /note="2'-OMe-nucleotide"
  modified_base 18..18: /mod_base="OTHER" /note="2'-fluoro-nucleotide"
  modified_base 19..19: /mod_base="OTHER" /note="2'-OMe-nucleotide"
  modified_base 20..20: /mod_base="OTHER" /note="dT"
  modified_base 21..21: /mod_base="OTHER" /note="dT"
uucauuagguuucauaaautt

SEQ ID NO: 741 - DNA, 21 bp, Artificial Sequence
  Description of Artificial Sequence: Synthetic oligonucleotide
  Description of Combined DNA/RNA Molecule: Synthetic oligonucleotide
  N-term hydroxyl group
  C-term hydroxyl group
  modified_base 1..1: /mod_base="OTHER" /note="2'-fluoro-nucleotide"
  modified_base 2..2: /mod_base="OTHER" /note="2'-fluoro-nucleotide"
  modified_base 3..3: /mod_base="OTHER" /note="2'-OMe-nucleotide"
  modified_base 4..4: /mod_base="OTHER" /note="2'-fluoro-nucleotide"
  modified_base 5..5: /mod_base="OTHER" /note="2'-OMe-nucleotide"
  modified_base 6..6: /mod_base="OTHER" /note="2'-fluoro-nucleotide"
  modified_base 7..7: /mod_base="OTHER" /note="2'-OMe-nucleotide"
  modified_base 8..8: /mod_base="OTHER" /note="2'-fluoro-nucleotide"
  modified_base 9..9: /mod_base="OTHER" /note="2'-OMe-nucleotide"
  modified_base 10..10: /mod_base="OTHER" /note="2'-fluoro-nucleotide"
  modified_base 11..11: /mod_base="OTHER" /note="2'-OMe-nucleotide"
  modified_base 12..12: /mod_base="OTHER" /note="2'-fluoro-nucleotide"
  modified_base 13..13: /mod_base="OTHER" /note="2'-OMe-nucleotide"
  modified_base 14..14: /mod_base="OTHER" /note="2'-fluoro-nucleotide"
  modified_base 15..15: /mod_base="OTHER" /note="2'-OMe-nucleotide"
  modified_base 16..16: /mod_base="OTHER" /note="2'-fluoro-nucleotide"
  modified_base 17..17: /mod_base="OTHER" /note="2'-OMe-nucleotide"
  modified_base 18..18: /mod_base="OTHER" /note="2'-fluoro-nucleotide"
  modified_base 19..19: /mod_base="OTHER" /note="2'-OMe-nucleotide"
  modified_base 20..20: /mod_base="OTHER" /note="dT"
  modified_base 21..21: /mod_base="OTHER" /note="dT"
cuucauuagguuucauaaatt

SEQ ID NO: 742 - DNA, 21 bp, Artificial Sequence
  Description of Artificial Sequence: Synthetic oligonucleotide
  Description of Combined DNA/RNA Molecule: Synthetic oligonucleotide
  N-term hydroxyl group
  C-term hydroxyl group
  modified_base 1..1: /mod_base="OTHER" /note="2'-fluoro-nucleotide"
  modified_base 2..2: /mod_base="OTHER" /note="2'-fluoro-nucleotide"
  modified_base 3..3: /mod_base="OTHER" /note="2'-OMe-nucleotide"
  modified_base 4..4: /mod_base="OTHER" /note="2'-fluoro-nucleotide"
  modified_base 5..5: /mod_base="OTHER" /note="2'-OMe-nucleotide"
  modified_base 6..6: /mod_base="OTHER" /note="2'-fluoro-nucleotide"
  modified_base 7..7: /mod_base="OTHER" /note="2'-OMe-nucleotide"
  modified_base 8..8: /mod_base="OTHER" /note="2'-fluoro-nucleotide"
  modified_base 9..9: /mod_base="OTHER" /note="2'-OMe-nucleotide"
  modified_base 10..10: /mod_base="OTHER" /note="2'-fluoro-nucleotide"
  modified_base 11..11: /mod_base="OTHER" /note="2'-OMe-nucleotide"
  modified_base 12..12: /mod_base="OTHER" /note="2'-fluoro-nucleotide"
  modified_base 13..13: /mod_base="OTHER" /note="2'-OMe-nucleotide"
  modified_base 14..14: /mod_base="OTHER" /note="2'-fluoro-nucleotide"
  modified_base 15..15: /mod_base="OTHER" /note="2'-OMe-nucleotide"
  modified_base 16..16: /mod_base="OTHER" /note="2'-fluoro-nucleotide"
  modified_base 17..17: /mod_base="OTHER" /note="2'-OMe-nucleotide"
  modified_base 18..18: /mod_base="OTHER" /note="2'-fluoro-nucleotide"
  modified_base 19..19: /mod_base="OTHER" /note="2'-OMe-nucleotide"
  modified_base 20..20: /mod_base="OTHER" /note="dT"
  modified_base 21..21: /mod_base="OTHER" /note="dT"
ugcuucauuagguuucauatt

SEQ ID NO: 743 - DNA, 21 bp, Artificial Sequence
  Description of Artificial Sequence: Synthetic oligonucleotide
  Description of Combined DNA/RNA Molecule: Synthetic oligonucleotide
  N-term hydroxyl group
  C-term hydroxyl group
  modified_base 1..1: /mod_base="OTHER" /note="2'-fluoro-nucleotide"
  modified_base 2..2: /mod_base="OTHER" /note="2'-fluoro-nucleotide"
  modified_base 3..3: /mod_base="OTHER" /note="2'-OMe-nucleotide"
  modified_base 4..4: /mod_base="OTHER" /note="2'-fluoro-nucleotide"
  modified_base 5..5: /mod_base="OTHER" /note="2'-OMe-nucleotide"
  modified_base 6..6: /mod_base="OTHER" /note="2'-fluoro-nucleotide"
  modified_base 7..7: /mod_base="OTHER" /note="2'-OMe-nucleotide"
  modified_base 8..8: /mod_base="OTHER" /note="2'-fluoro-nucleotide"
  modified_base 9..9: /mod_base="OTHER" /note="2'-OMe-nucleotide"
  modified_base 10..10: /mod_base="OTHER" /note="2'-fluoro-nucleotide"
  modified_base 11..11: /mod_base="OTHER" /note="2'-OMe-nucleotide"
  modified_base 12..12: /mod_base="OTHER" /note="2'-fluoro-nucleotide"
  modified_base 13..13: /mod_base="OTHER" /note="2'-OMe-nucleotide"
  modified_base 14..14: /mod_base="OTHER" /note="2'-fluoro-nucleotide"
  modified_base 15..15: /mod_base="OTHER" /note="2'-OMe-nucleotide"
  modified_base 16..16: /mod_base="OTHER" /note="2'-fluoro-nucleotide"
  modified_base 17..17: /mod_base="OTHER" /note="2'-OMe-nucleotide"
  modified_base 18..18: /mod_base="OTHER" /note="2'-fluoro-nucleotide"
  modified_base 19..19: /mod_base="OTHER" /note="2'-OMe-nucleotide"
  modified_base 20..20: /mod_base="OTHER" /note="dT"
  modified_base 21..21: /mod_base="OTHER" /note="dT"
cugcuucauuagguuucautt

SEQ ID NO: 744 - DNA, 21 bp, Artificial Sequence
  Description of Artificial Sequence: Synthetic oligonucleotide
  Description of Combined DNA/RNA Molecule: Synthetic oligonucleotide
  N-term hydroxyl group
  C-term hydroxyl group
  modified_base 1..1: /mod_base="OTHER" /note="2'-fluoro-nucleotide"
  modified_base 2..2: /mod_base="OTHER" /note="2'-fluoro-nucleotide"
  modified_base 3..3: /mod_base="OTHER" /note="2'-OMe-nucleotide"
  modified_base 4..4: /mod_base="OTHER" /note="2'-fluoro-nucleotide"
  modified_base 5..5: /mod_base="OTHER" /note="2'-OMe-nucleotide"
  modified_base 6..6: /mod_base="OTHER" /note="2'-fluoro-nucleotide"
  modified_base 7..7: /mod_base="OTHER" /note="2'-OMe-nucleotide"
  modified_base 8..8: /mod_base="OTHER" /note="2'-fluoro-nucleotide"
  modified_base 9..9: /mod_base="OTHER" /note="2'-OMe-nucleotide"
  modified_base 10..10: /mod_base="OTHER" /note="2'-fluoro-nucleotide"
  modified_base 11..11: /mod_base="OTHER" /note="2'-OMe-nucleotide"
  modified_base 12..12: /mod_base="OTHER" /note="2'-fluoro-nucleotide"
  modified_base 13..13: /mod_base="OTHER" /note="2'-OMe-nucleotide"
  modified_base 14..14: /mod_base="OTHER" /note="2'-fluoro-nucleotide"
  modified_base 15..15: /mod_base="OTHER" /note="2'-OMe-nucleotide"
  modified_base 16..16: /mod_base="OTHER" /note="2'-fluoro-nucleotide"
  modified_base 17..17: /mod_base="OTHER" /note="2'-OMe-nucleotide"
  modified_base 18..18: /mod_base="OTHER" /note="2'-fluoro-nucleotide"
  modified_base 19..19: /mod_base="OTHER" /note="2'-OMe-nucleotide"
  modified_base 20..20: /mod_base="OTHER" /note="dT"
  modified_base 21..21: /mod_base="OTHER" /note="dT"
aagucaaugugacuuaguatt

SEQ ID NO: 745 - DNA, 21 bp, Artificial Sequence
  Description of Artificial Sequence: Synthetic oligonucleotide
  Description of Combined DNA/RNA Molecule: Synthetic oligonucleotide
  N-term hydroxyl group
  C-term hydroxyl group
  modified_base 1..1: /mod_base="OTHER" /note="2'-fluoro-nucleotide"
  modified_base 2..2: /mod_base="OTHER" /note="2'-fluoro-nucleotide"
  modified_base 3..3: /mod_base="OTHER" /note="2'-OMe-nucleotide"
  modified_base 4..4: /mod_base="OTHER" /note="2'-fluoro-nucleotide"
  modified_base 5..5: /mod_base="OTHER" /note="2'-OMe-nucleotide"
  modified_base 6..6: /mod_base="OTHER" /note="2'-fluoro-nucleotide"
  modified_base 7..7: /mod_base="OTHER" /note="2'-OMe-nucleotide"
  modified_base 8..8: /mod_base="OTHER" /note="2'-fluoro-nucleotide"
  modified_base 9..9: /mod_base="OTHER" /note="2'-OMe-nucleotide"
  modified_base 10..10: /mod_base="OTHER" /note="2'-fluoro-nucleotide"
  modified_base 11..11: /mod_base="OTHER" /note="2'-OMe-nucleotide"
  modified_base 12..12: /mod_base="OTHER" /note="2'-fluoro-nucleotide"
  modified_base 13..13: /mod_base="OTHER" /note="2'-OMe-nucleotide"
  modified_base 14..14: /mod_base="OTHER" /note="2'-fluoro-nucleotide"
  modified_base 15..15: /mod_base="OTHER" /note="2'-OMe-nucleotide"
  modified_base 16..16: /mod_base="OTHER" /note="2'-fluoro-nucleotide"
  modified_base 17..17: /mod_base="OTHER" /note="2'-OMe-nucleotide"
  modified_base 18..18: /mod_base="OTHER" /note="2'-fluoro-nucleotide"
  modified_base 19..19: /mod_base="OTHER" /note="2'-OMe-nucleotide"
  modified_base 20..20: /mod_base="OTHER" /note="dT"
  modified_base 21..21: /mod_base="OTHER" /note="dT"
aaagucaaugugacuuagutt

SEQ ID NO: 746 - DNA, 21 bp, Artificial Sequence
  Description of Artificial Sequence: Synthetic oligonucleotide
  Description of Combined DNA/RNA Molecule: Synthetic oligonucleotide
  N-term hydroxyl group
  C-term hydroxyl group
  modified_base 1..1: /mod_base="OTHER" /note="2'-fluoro-nucleotide"
  modified_base 2..2: /mod_base="OTHER" /note="2'-fluoro-nucleotide"
  modified_base 3..3: /mod_base="OTHER" /note="2'-OMe-nucleotide"
  modified_base 4..4: /mod_base="OTHER" /note="2'-fluoro-nucleotide"
  modified_base 5..5: /mod_base="OTHER" /note="2'-OMe-nucleotide"
  modified_base 6..6: /mod_base="OTHER" /note="2'-fluoro-nucleotide"
  modified_base 7..7: /mod_base="OTHER" /note="2'-OMe-nucleotide"
  modified_base 8..8: /mod_base="OTHER" /note="2'-fluoro-nucleotide"
  modified_base 9..9: /mod_base="OTHER" /note="2'-OMe-nucleotide"
  modified_base 10..10: /mod_base="OTHER" /note="2'-fluoro-nucleotide"
  modified_base 11..11: /mod_base="OTHER" /note="2'-OMe-nucleotide"
  modified_base 12..12: /mod_base="OTHER" /note="2'-fluoro-nucleotide"
  modified_base 13..13: /mod_base="OTHER" /note="2'-OMe-nucleotide"
  modified_base 14..14: /mod_base="OTHER" /note="2'-fluoro-nucleotide"
  modified_base 15..15: /mod_base="OTHER" /note="2'-OMe-nucleotide"
  modified_base 16..16: /mod_base="OTHER" /note="2'-fluoro-nucleotide"
  modified_base 17..17: /mod_base="OTHER" /note="2'-OMe-nucleotide"
  modified_base 18..18: /mod_base="OTHER" /note="2'-fluoro-nucleotide"
  modified_base 19..19: /mod_base="OTHER" /note="2'-OMe-nucleotide"
  modified_base 20..20: /mod_base="OTHER" /note="dT"
  modified_base 21..21: /mod_base="OTHER" /note="dT"
uaaagucaaugugacuuagtt

SEQ ID NO: 747 - DNA, 21 bp, Artificial Sequence
  Description of Artificial Sequence: Synthetic oligonucleotide
  Description of Combined DNA/RNA Molecule: Synthetic oligonucleotide
  N-term hydroxyl group
  C-term hydroxyl group
  modified_base 1..1: /mod_base="OTHER" /note="2'-fluoro-nucleotide"
  modified_base 2..2: /mod_base="OTHER" /note="2'-fluoro-nucleotide"
  modified_base 3..3: /mod_base="OTHER" /note="2'-OMe-nucleotide"
  modified_base 4..4: /mod_base="OTHER" /note="2'-fluoro-nucleotide"
  modified_base 5..5: /mod_base="OTHER" /note="2'-OMe-nucleotide"
  modified_base 6..6: /mod_base="OTHER" /note="2'-fluoro-nucleotide"
  modified_base 7..7: /mod_base="OTHER" /note="2'-OMe-nucleotide"
  modified_base 8..8: /mod_base="OTHER" /note="2'-fluoro-nucleotide"
  modified_base 9..9: /mod_base="OTHER" /note="2'-OMe-nucleotide"
  modified_base 10..10: /mod_base="OTHER" /note="2'-fluoro-nucleotide"
  modified_base 11..11: /mod_base="OTHER" /note="2'-OMe-nucleotide"
  modified_base 12..12: /mod_base="OTHER" /note="2'-fluoro-nucleotide"
  modified_base 13..13: /mod_base="OTHER" /note="2'-OMe-nucleotide"
  modified_base 14..14: /mod_base="OTHER" /note="2'-fluoro-nucleotide"
  modified_base 15..15: /mod_base="OTHER" /note="2'-OMe-nucleotide"
  modified_base 16..16: /mod_base="OTHER" /note="2'-fluoro-nucleotide"
  modified_base 17..17: /mod_base="OTHER" /note="2'-OMe-nucleotide"
  modified_base 18..18: /mod_base="OTHER" /note="2'-fluoro-nucleotide"
  modified_base 19..19: /mod_base="OTHER" /note="2'-OMe-nucleotide"
  modified_base 20..20: /mod_base="OTHER" /note="dT"
  modified_base 21..21: /mod_base="OTHER" /note="dT"
uuaaagucaaugugacuuatt

SEQ ID NO: 748 - DNA, 21 bp, Artificial Sequence
  Description of Artificial Sequence: Synthetic oligonucleotide
  Description of Combined DNA/RNA Molecule: Synthetic oligonucleotide
  N-term hydroxyl group
  C-term hydroxyl group
  modified_base 1..1: /mod_base="OTHER" /note="2'-fluoro-nucleotide"
  modified_base 2..2: /mod_base="OTHER" /note="2'-fluoro-nucleotide"
  modified_base 3..3: /mod_base="OTHER" /note="2'-OMe-nucleotide"
  modified_base 4..4: /mod_base="OTHER" /note="2'-fluoro-nucleotide"
  modified_base 5..5: /mod_base="OTHER" /note="2'-OMe-nucleotide"
  modified_base 6..6: /mod_base="OTHER" /note="2'-fluoro-nucleotide"
  modified_base 7..7: /mod_base="OTHER" /note="2'-OMe-nucleotide"
  modified_base 8..8: /mod_base="OTHER" /note="2'-fluoro-nucleotide"
  modified_base 9..9: /mod_base="OTHER" /note="2'-OMe-nucleotide"
  modified_base 10..10: /mod_base="OTHER" /note="2'-fluoro-nucleotide"
  modified_base 11..11: /mod_base="OTHER" /note="2'-OMe-nucleotide"
  modified_base 12..12: /mod_base="OTHER" /note="2'-fluoro-nucleotide"
  modified_base 13..13: /mod_base="OTHER" /note="2'-OMe-nucleotide"
  modified_base 14..14: /mod_base="OTHER" /note="2'-fluoro-nucleotide"
  modified_base 15..15: /mod_base="OTHER" /note="2'-OMe-nucleotide"
  modified_base 16..16: /mod_base="OTHER" /note="2'-fluoro-nucleotide"
  modified_base 17..17: /mod_base="OTHER" /note="2'-OMe-nucleotide"
  modified_base 18..18: /mod_base="OTHER" /note="2'-fluoro-nucleotide"
  modified_base 19..19: /mod_base="OTHER" /note="2'-OMe-nucleotide"
  modified_base 20..20: /mod_base="OTHER" /note="dT"
  modified_base 21..21: /mod_base="OTHER" /note="dT"
uaagguauagugauaccuctt

SEQ ID NO: 749 - DNA, 21 bp, Artificial Sequence
  Description of Artificial Sequence: Synthetic oligonucleotide
  Description of Combined DNA/RNA Molecule: Synthetic oligonucleotide
  N-term hydroxyl group
  C-term hydroxyl group
  modified_base 1..1: /mod_base="OTHER" /note="2'-fluoro-nucleotide"
  modified_base 2..2: /mod_base="OTHER" /note="2'-fluoro-nucleotide"
  modified_base 3..3: /mod_base="OTHER" /note="2'-OMe-nucleotide"
  modified_base 4..4: /mod_base="OTHER" /note="2'-fluoro-nucleotide"
  modified_base 5..5: /mod_base="OTHER" /note="2'-OMe-nucleotide"
  modified_base 6..6: /mod_base="OTHER" /note="2'-fluoro-nucleotide"
  modified_base 7..7: /mod_base="OTHER" /note="2'-OMe-nucleotide"
  modified_base 8..8: /mod_base="OTHER" /note="2'-fluoro-nucleotide"
  modified_base 9..9: /mod_base="OTHER" /note="2'-OMe-nucleotide"
  modified_base 10..10: /mod_base="OTHER" /note="2'-fluoro-nucleotide"
  modified_base 11..11: /mod_base="OTHER" /note="2'-OMe-nucleotide"
  modified_base 12..12: /mod_base="OTHER" /note="2'-fluoro-nucleotide"
  modified_base 13..13: /mod_base="OTHER" /note="2'-OMe-nucleotide"
  modified_base 14..14: /mod_base="OTHER" /note="2'-fluoro-nucleotide"
  modified_base 15..15: /mod_base="OTHER" /note="2'-OMe-nucleotide"
  modified_base 16..16: /mod_base="OTHER" /note="2'-fluoro-nucleotide"
  modified_base 17..17: /mod_base="OTHER" /note="2'-OMe-nucleotide"
  modified_base 18..18: /mod_base="OTHER" /note="2'-fluoro-nucleotide"
  modified_base 19..19: /mod_base="OTHER" /note="2'-OMe-nucleotide"
  modified_base 20..20: /mod_base="OTHER" /note="dT"
  modified_base 21..21: /mod_base="OTHER" /note="dT"
uuguuuucauaguauuaagtt

SEQ ID NO: 750 - DNA, 21 bp, Artificial Sequence
  Description of Artificial Sequence: Synthetic oligonucleotide
  Description of Combined DNA/RNA Molecule: Synthetic oligonucleotide
  N-term hydroxyl group
  C-term hydroxyl group
  modified_base 1..1: /mod_base="OTHER" /note="2'-fluoro-nucleotide"
  modified_base 2..2: /mod_base="OTHER" /note="2'-fluoro-nucleotide"
  modified_base 3..3: /mod_base="OTHER" /note="2'-OMe-nucleotide"
  modified_base 4..4: /mod_base="OTHER" /note="2'-fluoro-nucleotide"
  modified_base 5..5: /mod_base="OTHER" /note="2'-OMe-nucleotide"
  modified_base 6..6: /mod_base="OTHER" /note="2'-fluoro-nucleotide"
  modified_base 7..7: /mod_base="OTHER" /note="2'-OMe-nucleotide"
  modified_base 8..8: /mod_base="OTHER" /note="2'-fluoro-nucleotide"
  modified_base 9..9: /mod_base="OTHER" /note="2'-OMe-nucleotide"
  modified_base 10..10: /mod_base="OTHER" /note="2'-fluoro-nucleotide"
  modified_base 11..11: /mod_base="OTHER" /note="2'-OMe-nucleotide"
  modified_base 12..12: /mod_base="OTHER" /note="2'-fluoro-nucleotide"
  modified_base 13..13: /mod_base="OTHER" /note="2'-OMe-nucleotide"
  modified_base 14..14: /mod_base="OTHER" /note="2'-fluoro-nucleotide"
  modified_base 15..15: /mod_base="OTHER" /note="2'-OMe-nucleotide"
  modified_base 16..16: /mod_base="OTHER" /note="2'-fluoro-nucleotide"
  modified_base 17..17: /mod_base="OTHER" /note="2'-OMe-nucleotide"
  modified_base 18..18: /mod_base="OTHER" /note="2'-fluoro-nucleotide"
  modified_base 19..19: /mod_base="OTHER" /note="2'-OMe-nucleotide"
  modified_base 20..20: /mod_base="OTHER" /note="dT"
  modified_base 21..21: /mod_base="OTHER" /note="dT"
uauaaacuuuaacucgaugtt

SEQ ID NO: 751 - DNA, 21 bp, Artificial Sequence
  Description of Artificial Sequence: Synthetic oligonucleotide
  Description of Combined DNA/RNA Molecule: Synthetic oligonucleotide
  N-term hydroxyl group
  C-term hydroxyl group
  modified_base 1..1: /mod_base="OTHER" /note="2'-fluoro-nucleotide"
  modified_base 2..2: /mod_base="OTHER" /note="2'-fluoro-nucleotide"
  modified_base 3..3: /mod_base="OTHER" /note="2'-OMe-nucleotide"
  modified_base 4..4: /mod_base="OTHER" /note="2'-fluoro-nucleotide"
  modified_base 5..5: /mod_base="OTHER" /note="2'-OMe-nucleotide"
  modified_base 6..6: /mod_base="OTHER" /note="2'-fluoro-nucleotide"
  modified_base 7..7: /mod_base="OTHER" /note="2'-OMe-nucleotide"
  modified_base 8..8: /mod_base="OTHER" /note="2'-fluoro-nucleotide"
  modified_base 9..9: /mod_base="OTHER" /note="2'-OMe-nucleotide"
  modified_base 10..10: /mod_base="OTHER" /note="2'-fluoro-nucleotide"
  modified_base 11..11: /mod_base="OTHER" /note="2'-OMe-nucleotide"
  modified_base 12..12: /mod_base="OTHER" /note="2'-fluoro-nucleotide"
  modified_base 13..13: /mod_base="OTHER" /note="2'-OMe-nucleotide"
  modified_base 14..14: /mod_base="OTHER" /note="2'-fluoro-nucleotide"
  modified_base 15..15: /mod_base="OTHER" /note="2'-OMe-nucleotide"
  modified_base 16..16: /mod_base="OTHER" /note="2'-fluoro-nucleotide"
  modified_base 17..17: /mod_base="OTHER" /note="2'-OMe-nucleotide"
  modified_base 18..18: /mod_base="OTHER" /note="2'-fluoro-nucleotide"
  modified_base 19..19: /mod_base="OTHER" /note="2'-OMe-nucleotide"
  modified_base 20..20: /mod_base="OTHER" /note="dT"
  modified_base 21..21: /mod_base="OTHER" /note="dT"
auauaaacuuuaacucgautt

SEQ ID NO: 752 - DNA, 21 bp, Artificial Sequence
  Description of Artificial Sequence: Synthetic oligonucleotide
  Description of Combined DNA/RNA Molecule: Synthetic oligonucleotide
  N-term hydroxyl group
  C-term hydroxyl group
  modified_base 1..1: /mod_base="OTHER" /note="2'-fluoro-nucleotide"
  modified_base 2..2: /mod_base="OTHER" /note="2'-fluoro-nucleotide"
  modified_base 3..3: /mod_base="OTHER" /note="2'-OMe-nucleotide"
  modified_base 4..4: /mod_base="OTHER" /note="2'-fluoro-nucleotide"
  modified_base 5..5: /mod_base="OTHER" /note="2'-OMe-nucleotide"
  modified_base 6..6: /mod_base="OTHER" /note="2'-fluoro-nucleotide"
  modified_base 7..7: /mod_base="OTHER" /note="2'-OMe-nucleotide"
  modified_base 8..8: /mod_base="OTHER" /note="2'-fluoro-nucleotide"
  modified_base 9..9: /mod_base="OTHER" /note="2'-OMe-nucleotide"
  modified_base 10..10: /mod_base="OTHER" /note="2'-fluoro-nucleotide"
  modified_base 11..11: /mod_base="OTHER" /note="2'-OMe-nucleotide"
  modified_base 12..12: /mod_base="OTHER" /note="2'-fluoro-nucleotide"
  modified_base 13..13: /mod_base="OTHER" /note="2'-OMe-nucleotide"
  modified_base 14..14: /mod_base="OTHER" /note="2'-fluoro-nucleotide"
  modified_base 15..15: /mod_base="OTHER" /note="2'-OMe-nucleotide"
  modified_base 16..16: /mod_base="OTHER" /note="2'-fluoro-nucleotide"
  modified_base 17..17: /mod_base="OTHER" /note="2'-OMe-nucleotide"
  modified_base 18..18: /mod_base="OTHER" /note="2'-fluoro-nucleotide"
  modified_base 19..19: /mod_base="OTHER" /note="2'-OMe-nucleotide"
  modified_base 20..20: /mod_base="OTHER" /note="dT"
  modified_base 21..21: /mod_base="OTHER" /note="dT"
aauauaaacuuuaacucgatt

SEQ ID NO: 753 - DNA, 21 bp, Artificial Sequence
  Description of Artificial Sequence: Synthetic oligonucleotide
  Description of Combined DNA/RNA Molecule: Synthetic oligonucleotide
  N-term hydroxyl group
  C-term hydroxyl group
  modified_base 1..1: /mod_base="OTHER" /note="2'-fluoro-nucleotide"
  modified_base 2..2: /mod_base="OTHER" /note="2'-fluoro-nucleotide"
  modified_base 3..3: /mod_base="OTHER" /note="2'-OMe-nucleotide"
  modified_base 4..4: /mod_base="OTHER" /note="2'-fluoro-nucleotide"
  modified_base 5..5: /mod_base="OTHER" /note="2'-OMe-nucleotide"
  modified_base 6..6: /mod_base="OTHER" /note="2'-fluoro-nucleotide"
  modified_base 7..7: /mod_base="OTHER" /note="2'-OMe-nucleotide"
  modified_base 8..8: /mod_base="OTHER" /note="2'-fluoro-nucleotide"
  modified_base 9..9: /mod_base="OTHER" /note="2'-OMe-nucleotide"
  modified_base 10..10: /mod_base="OTHER" /note="2'-fluoro-nucleotide"
  modified_base 11..11: /mod_base="OTHER" /note="2'-OMe-nucleotide"
  modified_base 12..12: /mod_base="OTHER" /note="2'-fluoro-nucleotide"
  modified_base 13..13: /mod_base="OTHER" /note="2'-OMe-nucleotide"
  modified_base 14..14: /mod_base="OTHER" /note="2'-fluoro-nucleotide"
  modified_base 15..15: /mod_base="OTHER" /note="2'-OMe-nucleotide"
  modified_base 16..16: /mod_base="OTHER" /note="2'-fluoro-nucleotide"
  modified_base 17..17: /mod_base="OTHER" /note="2'-OMe-nucleotide"
  modified_base 18..18: /mod_base="OTHER" /note="2'-fluoro-nucleotide"
  modified_base 19..19: /mod_base="OTHER" /note="2'-OMe-nucleotide"
  modified_base 20..20: /mod_base="OTHER" /note="dT"
  modified_base 21..21: /mod_base="OTHER" /note="dT"
aaauauaaacuuuaacucgtt

SEQ ID NO: 754 - DNA, 21 bp, Artificial Sequence
  Description of Artificial Sequence: Synthetic oligonucleotide
  Description of Combined DNA/RNA Molecule: Synthetic oligonucleotide
  N-term hydroxyl group
  C-term hydroxyl group
  modified_base 1..1: /mod_base="OTHER" /note="2'-fluoro-nucleotide"
  modified_base 2..2: /mod_base="OTHER" /note="2'-fluoro-nucleotide"
  modified_base 3..3: /mod_base="OTHER" /note="2'-OMe-nucleotide"
  modified_base 4..4: /mod_base="OTHER" /note="2'-fluoro-nucleotide"
  modified_base 5..5: /mod_base="OTHER" /note="2'-OMe-nucleotide"
  modified_base 6..6: /mod_base="OTHER" /note="2'-fluoro-nucleotide"
  modified_base 7..7: /mod_base="OTHER" /note="2'-OMe-nucleotide"
  modified_base 8..8: /mod_base="OTHER" /note="2'-fluoro-nucleotide"
  modified_base 9..9: /mod_base="OTHER" /note="2'-OMe-nucleotide"
  modified_base 10..10: /mod_base="OTHER" /note="2'-fluoro-nucleotide"
  modified_base 11..11: /mod_base="OTHER" /note="2'-OMe-nucleotide"
  modified_base 12..12: /mod_base="OTHER" /note="2'-fluoro-nucleotide"
  modified_base 13..13: /mod_base="OTHER" /note="2'-OMe-nucleotide"
  modified_base 14..14: /mod_base="OTHER" /note="2'-fluoro-nucleotide"
  modified_base 15..15: /mod_base="OTHER" /note="2'-OMe-nucleotide"
  modified_base 16..16: /mod_base="OTHER" /note="2'-fluoro-nucleotide"
  modified_base 17..17: /mod_base="OTHER" /note="2'-OMe-nucleotide"
  modified_base 18..18: /mod_base="OTHER" /note="2'-fluoro-nucleotide"
  modified_base 19..19: /mod_base="OTHER" /note="2'-OMe-nucleotide"
  modified_base 20..20: /mod_base="OTHER" /note="dT"
  modified_base 21..21: /mod_base="OTHER" /note="dT"
uuaggggaaauauaaacuutt

SEQ ID NO: 755 - DNA, 21 bp, Artificial Sequence
  Description of Artificial Sequence: Synthetic oligonucleotide
  Description of Combined DNA/RNA Molecule: Synthetic oligonucleotide
  N-term hydroxyl group
  C-term hydroxyl group
  modified_base 1..1: /mod_base="OTHER" /note="2'-fluoro-nucleotide"
  modified_base 2..2: /mod_base="OTHER" /note="2'-fluoro-nucleotide"
  modified_base 3..3: /mod_base="OTHER" /note="2'-OMe-nucleotide"
  modified_base 4..4: /mod_base="OTHER" /note="2'-fluoro-nucleotide"
  modified_base 5..5: /mod_base="OTHER" /note="2'-OMe-nucleotide"
  modified_base 6..6: /mod_base="OTHER" /note="2'-fluoro-nucleotide"
  modified_base 7..7: /mod_base="OTHER" /note="2'-OMe-nucleotide"
  modified_base 8..8: /mod_base="OTHER" /note="2'-fluoro-nucleotide"
  modified_base 9..9: /mod_base="OTHER" /note="2'-OMe-nucleotide"
  modified_base 10..10: /mod_base="OTHER" /note="2'-fluoro-nucleotide"
  modified_base 11..11: /mod_base="OTHER" /note="2'-OMe-nucleotide"
  modified_base 12..12: /mod_base="OTHER" /note="2'-fluoro-nucleotide"
  modified_base 13..13: /mod_base="OTHER" /note="2'-OMe-nucleotide"
  modified_base 14..14: /mod_base="OTHER" /note="2'-fluoro-nucleotide"
  modified_base 15..15: /mod_base="OTHER" /note="2'-OMe-nucleotide"
  modified_base 16..16: /mod_base="OTHER" /note="2'-fluoro-nucleotide"
  modified_base 17..17: /mod_base="OTHER" /note="2'-OMe-nucleotide"
  modified_base 18..18: /mod_base="OTHER" /note="2'-fluoro-nucleotide"
  modified_base 19..19: /mod_base="OTHER" /note="2'-OMe-nucleotide"
  modified_base 20..20: /mod_base="OTHER" /note="dT"
  modified_base 21..21: /mod_base="OTHER" /note="dT"
uuuaggggaaauauaaacutt

SEQ ID NO: 756 - DNA, 21 bp, Artificial Sequence
  Description of Artificial Sequence: Synthetic oligonucleotide
  Description of Combined DNA/RNA Molecule: Synthetic oligonucleotide
  N-term hydroxyl group
  C-term hydroxyl group
  modified_base 1..1: /mod_base="OTHER" /note="2'-fluoro-nucleotide"
  modified_base 2..2: /mod_base="OTHER" /note="2'-fluoro-nucleotide"
  modified_base 3..3: /mod_base="OTHER" /note="2'-OMe-nucleotide"
  modified_base 4..4: /mod_base="OTHER" /note="2'-fluoro-nucleotide"
  modified_base 5..5: /mod_base="OTHER" /note="2'-OMe-nucleotide"
  modified_base 6..6: /mod_base="OTHER" /note="2'-fluoro-nucleotide"
  modified_base 7..7: /mod_base="OTHER" /note="2'-OMe-nucleotide"
  modified_base 8..8: /mod_base="OTHER" /note="2'-fluoro-nucleotide"
  modified_base 9..9: /mod_base="OTHER" /note="2'-OMe-nucleotide"
  modified_base 10..10: /mod_base="OTHER" /note="2'-fluoro-nucleotide"
  modified_base 11..11: /mod_base="OTHER" /note="2'-OMe-nucleotide"
  modified_base 12..12: /mod_base="OTHER" /note="2'-fluoro-nucleotide"
  modified_base 13..13: /mod_base="OTHER" /note="2'-OMe-nucleotide"
  modified_base 14..14: /mod_base="OTHER" /note="2'-fluoro-nucleotide"
  modified_base 15..15: /mod_base="OTHER" /note="2'-OMe-nucleotide"
  modified_base 16..16: /mod_base="OTHER" /note="2'-fluoro-nucleotide"
  modified_base 17..17: /mod_base="OTHER" /note="2'-OMe-nucleotide"
  modified_base 18..18: /mod_base="OTHER" /note="2'-fluoro-nucleotide"
  modified_base 19..19: /mod_base="OTHER" /note="2'-OMe-nucleotide"
  modified_base 20..20: /mod_base="OTHER" /note="dT"
  modified_base 21..21: /mod_base="OTHER" /note="dT"
cagcauauuuaggggaaautt

SEQ ID NO: 757 - DNA, 21 bp, Artificial Sequence
  Description of Artificial Sequence: Synthetic oligonucleotide
  Description of Combined DNA/RNA Molecule: Synthetic oligonucleotide
  N-term hydroxyl group
  C-term hydroxyl group
  modified_base 1..1: /mod_base="OTHER" /note="2'-fluoro-nucleotide"
  modified_base 2..2: /mod_base="OTHER" /note="2'-fluoro-nucleotide"
  modified_base 3..3: /mod_base="OTHER" /note="2'-OMe-nucleotide"
  modified_base 4..4: /mod_base="OTHER" /note="2'-fluoro-nucleotide"
  modified_base 5..5: /mod_base="OTHER" /note="2'-OMe-nucleotide"
  modified_base 6..6: /mod_base="OTHER" /note="2'-fluoro-nucleotide"
  modified_base 7..7: /mod_base="OTHER" /note="2'-OMe-nucleotide"
  modified_base 8..8: /mod_base="OTHER" /note="2'-fluoro-nucleotide"
  modified_base 9..9: /mod_base="OTHER" /note="2'-OMe-nucleotide"
  modified_base 10..10: /mod_base="OTHER" /note="2'-fluoro-nucleotide"
  modified_base 11..11: /mod_base="OTHER" /note="2'-OMe-nucleotide"
  modified_base 12..12: /mod_base="OTHER" /note="2'-fluoro-nucleotide"
  modified_base 13..13: /mod_base="OTHER" /note="2'-OMe-nucleotide"
  modified_base 14..14: /mod_base="OTHER" /note="2'-fluoro-nucleotide"
  modified_base 15..15: /mod_base="OTHER" /note="2'-OMe-nucleotide"
  modified_base 16..16: /mod_base="OTHER" /note="2'-fluoro-nucleotide"
  modified_base 17..17: /mod_base="OTHER" /note="2'-OMe-nucleotide"
  modified_base 18..18: /mod_base="OTHER" /note="2'-fluoro-nucleotide"
  modified_base 19..19: /mod_base="OTHER" /note="2'-OMe-nucleotide"
  modified_base 20..20: /mod_base="OTHER" /note="dT"
  modified_base 21..21: /mod_base="OTHER" /note="dT"
aaucuuuagggauuuagggtt

SEQ ID NO: 758 - DNA, 21 bp, Artificial Sequence
  Description of Artificial Sequence: Synthetic oligonucleotide
  Description of Combined DNA/RNA Molecule: Synthetic oligonucleotide
  N-term hydroxyl group
  C-term hydroxyl group
  modified_base 1..1: /mod_base="OTHER" /note="2'-fluoro-nucleotide"
  modified_base 2..2: /mod_base="OTHER" /note="2'-fluoro-nucleotide"
  modified_base 3..3: /mod_base="OTHER" /note="2'-OMe-nucleotide"
  modified_base 4..4: /mod_base="OTHER" /note="2'-fluoro-nucleotide"
  modified_base 5..5: /mod_base="OTHER" /note="2'-OMe-nucleotide"
  modified_base 6..6: /mod_base="OTHER" /note="2'-fluoro-nucleotide"
  modified_base 7..7: /mod_base="OTHER" /note="2'-OMe-nucleotide"
  modified_base 8..8: /mod_base="OTHER" /note="2'-fluoro-nucleotide"
  modified_base 9..9: /mod_base="OTHER" /note="2'-OMe-nucleotide"
  modified_base 10..10: /mod_base="OTHER" /note="2'-fluoro-nucleotide"
  modified_base 11..11: /mod_base="OTHER" /note="2'-OMe-nucleotide"
  modified_base 12..12: /mod_base="OTHER" /note="2'-fluoro-nucleotide"
  modified_base 13..13: /mod_base="OTHER" /note="2'-OMe-nucleotide"
  modified_base 14..14: /mod_base="OTHER" /note="2'-fluoro-nucleotide"
  modified_base 15..15: /mod_base="OTHER" /note="2'-OMe-nucleotide"
  modified_base 16..16: /mod_base="OTHER" /note="2'-fluoro-nucleotide"
  modified_base 17..17: /mod_base="OTHER" /note="2'-OMe-nucleotide"
  modified_base 18..18: /mod_base="OTHER" /note="2'-fluoro-nucleotide"
  modified_base 19..19: /mod_base="OTHER" /note="2'-OMe-nucleotide"
  modified_base 20..20: /mod_base="OTHER" /note="dT"
  modified_base 21..21: /mod_base="OTHER" /note="dT"
uaaucuuuagggauuuaggtt

SEQ ID NO: 759 - DNA, 21 bp, Artificial Sequence
  Description of Artificial Sequence: Synthetic oligonucleotide
  Description of Combined DNA/RNA Molecule: Synthetic oligonucleotide
  N-term hydroxyl group
  C-term hydroxyl group
  modified_base 1..1: /mod_base="OTHER" /note="2'-fluoro-nucleotide"
  modified_base 2..2: /mod_base="OTHER" /note="2'-fluoro-nucleotide"
  modified_base 3..3: /mod_base="OTHER" /note="2'-OMe-nucleotide"
  modified_base 4..4: /mod_base="OTHER" /note="2'-fluoro-nucleotide"
  modified_base 5..5: /mod_base="OTHER" /note="2'-OMe-nucleotide"
  modified_base 6..6: /mod_base="OTHER" /note="2'-fluoro-nucleotide"
  modified_base 7..7: /mod_base="OTHER" /note="2'-OMe-nucleotide"
  modified_base 8..8: /mod_base="OTHER" /note="2'-fluoro-nucleotide"
  modified_base 9..9: /mod_base="OTHER" /note="2'-OMe-nucleotide"
  modified_base 10..10: /mod_base="OTHER" /note="2'-fluoro-nucleotide"
  modified_base 11..11: /mod_base="OTHER" /note="2'-OMe-nucleotide"
  modified_base 12..12: /mod_base="OTHER" /note="2'-fluoro-nucleotide"
  modified_base 13..13: /mod_base="OTHER" /note="2'-OMe-nucleotide"
  modified_base 14..14: /mod_base="OTHER" /note="2'-fluoro-nucleotide"
  modified_base 15..15: /mod_base="OTHER" /note="2'-OMe-nucleotide"
  modified_base 16..16: /mod_base="OTHER" /note="2'-fluoro-nucleotide"
  modified_base 17..17: /mod_base="OTHER" /note="2'-OMe-nucleotide"
  modified_base 18..18: /mod_base="OTHER" /note="2'-fluoro-nucleotide"
  modified_base 19..19: /mod_base="OTHER" /note="2'-OMe-nucleotide"
  modified_base 20..20: /mod_base="OTHER" /note="dT"
  modified_base 21..21: /mod_base="OTHER" /note="dT"
cuaaucuuuagggauuuagtt

SEQ ID NO: 760 - DNA, 21 bp, Artificial Sequence
  Description of Artificial Sequence: Synthetic oligonucleotide
  Description of Combined DNA/RNA Molecule: Synthetic oligonucleotide
  N-term hydroxyl group
  C-term hydroxyl group
  modified_base 1..1: /mod_base="OTHER" /note="2'-fluoro-nucleotide"
  modified_base 2..2: /mod_base="OTHER" /note="2'-fluoro-nucleotide"
  modified_base 3..3: /mod_base="OTHER" /note="2'-OMe-nucleotide"
  modified_base 4..4: /mod_base="OTHER" /note="2'-fluoro-nucleotide"
  modified_base 5..5: /mod_base="OTHER" /note="2'-OMe-nucleotide"
  modified_base 6..6: /mod_base="OTHER" /note="2'-fluoro-nucleotide"
  modified_base 7..7: /mod_base="OTHER" /note="2'-OMe-nucleotide"
  modified_base 8..8: /mod_base="OTHER" /note="2'-fluoro-nucleotide"
  modified_base 9..9: /mod_base="OTHER" /note="2'-OMe-nucleotide"
  modified_base 10..10: /mod_base="OTHER" /note="2'-fluoro-nucleotide"
  modified_base 11..11: /mod_base="OTHER" /note="2'-OMe-nucleotide"
  modified_base 12..12: /mod_base="OTHER" /note="2'-fluoro-nucleotide"
  modified_base 13..13: /mod_base="OTHER" /note="2'-OMe-nucleotide"
  modified_base 14..14: /mod_base="OTHER" /note="2'-fluoro-nucleotide"
  modified_base 15..15: /mod_base="OTHER" /note="2'-OMe-nucleotide"
  modified_base 16..16: /mod_base="OTHER" /note="2'-fluoro-nucleotide"
  modified_base 17..17: /mod_base="OTHER" /note="2'-OMe-nucleotide"
  modified_base 18..18: /mod_base="OTHER" /note="2'-fluoro-nucleotide"
  modified_base 19..19: /mod_base="OTHER" /note="2'-OMe-nucleotide"
  modified_base 20..20: /mod_base="OTHER" /note="dT"
  modified_base 21..21: /mod_base="OTHER" /note="dT"
ucuaaucuuuagggauuuatt

SEQ ID NO: 761 - DNA, 21 bp, Artificial Sequence
  Description of Artificial Sequence: Synthetic oligonucleotide
  Description of Combined DNA/RNA Molecule: Synthetic oligonucleotide
  N-term hydroxyl group
  C-term hydroxyl group
  modified_base 1..1: /mod_base="OTHER" /note="2'-fluoro-nucleotide"
  modified_base 2..2: /mod_base="OTHER" /note="2'-fluoro-nucleotide"
  modified_base 3..3: /mod_base="OTHER" /note="2'-OMe-nucleotide"
  modified_base 4..4: /mod_base="OTHER" /note="2'-fluoro-nucleotide"
  modified_base 5..5: /mod_base="OTHER" /note="2'-OMe-nucleotide"
  modified_base 6..6: /mod_base="OTHER" /note="2'-fluoro-nucleotide"
  modified_base 7..7: /mod_base="OTHER" /note="2'-OMe-nucleotide"
  modified_base 8..8: /mod_base="OTHER" /note="2'-fluoro-nucleotide"
  modified_base 9..9: /mod_base="OTHER" /note="2'-OMe-nucleotide"
  modified_base 10..10: /mod_base="OTHER" /note="2'-fluoro-nucleotide"
  modified_base 11..11: /mod_base="OTHER" /note="2'-OMe-nucleotide"
  modified_base 12..12: /mod_base="OTHER" /note="2'-fluoro-nucleotide"
  modified_base 13..13: /mod_base="OTHER" /note="2'-OMe-nucleotide"
  modified_base 14..14: /mod_base="OTHER" /note="2'-fluoro-nucleotide"
  modified_base 15..15: /mod_base="OTHER" /note="2'-OMe-nucleotide"
  modified_base 16..16: /mod_base="OTHER" /note="2'-fluoro-nucleotide"
  modified_base 17..17: /mod_base="OTHER" /note="2'-OMe-nucleotide"
  modified_base 18..18: /mod_base="OTHER" /note="2'-fluoro-nucleotide"
  modified_base 19..19: /mod_base="OTHER" /note="2'-OMe-nucleotide"
  modified_base 20..20: /mod_base="OTHER" /note="dT"
  modified_base 21..21: /mod_base="OTHER" /note="dT"
aucuaaucuuuagggauuutt

SEQ ID NO: 762 - DNA, 21 bp, Artificial Sequence
  Description of Artificial Sequence: Synthetic oligonucleotide
  Description of Combined DNA/RNA Molecule: Synthetic oligonucleotide
  N-term hydroxyl group
  C-term hydroxyl group
  modified_base 1..1: /mod_base="OTHER" /note="2'-fluoro-nucleotide"
  modified_base 2..2: /mod_base="OTHER" /note="2'-fluoro-nucleotide"
  modified_base 3..3: /mod_base="OTHER" /note="2'-OMe-nucleotide"
  modified_base 4..4: /mod_base="OTHER" /note="2'-fluoro-nucleotide"
  modified_base 5..5: /mod_base="OTHER" /note="2'-OMe-nucleotide"
  modified_base 6..6: /mod_base="OTHER" /note="2'-fluoro-nucleotide"
  modified_base 7..7: /mod_base="OTHER" /note="2'-OMe-nucleotide"
  modified_base 8..8: /mod_base="OTHER" /note="2'-fluoro-nucleotide"
  modified_base 9..9: /mod_base="OTHER" /note="2'-OMe-nucleotide"
  modified_base 10..10: /mod_base="OTHER" /note="2'-fluoro-nucleotide"
  modified_base 11..11: /mod_base="OTHER" /note="2'-OMe-nucleotide"
  modified_base 12..12: /mod_base="OTHER" /note="2'-fluoro-nucleotide"
  modified_base 13..13: /mod_base="OTHER" /note="2'-OMe-nucleotide"
  modified_base 14..14: /mod_base="OTHER" /note="2'-fluoro-nucleotide"
  modified_base 15..15: /mod_base="OTHER" /note="2'-OMe-nucleotide"
  modified_base 16..16: /mod_base="OTHER" /note="2'-fluoro-nucleotide"
  modified_base 17..17: /mod_base="OTHER" /note="2'-OMe-nucleotide"
  modified_base 18..18: /mod_base="OTHER" /note="2'-fluoro-nucleotide"
  modified_base 19..19: /mod_base="OTHER" /note="2'-OMe-nucleotide"
  modified_base 20..20: /mod_base="OTHER" /note="dT"
  modified_base 21..21: /mod_base="OTHER" /note="dT"
cuuuaacaaauggguuuaatt

SEQ ID NO: 763 - DNA, 21 bp, Artificial Sequence
  Description of Artificial Sequence: Synthetic oligonucleotide
  Description of Combined DNA/RNA Molecule: Synthetic oligonucleotide
  N-term hydroxyl group
  C-term hydroxyl group
  modified_base 1..1: /mod_base="OTHER" /note="2'-fluoro-nucleotide"
  modified_base 2..2: /mod_base="OTHER" /note="2'-fluoro-nucleotide"
  modified_base 3..3: /mod_base="OTHER" /note="2'-OMe-nucleotide"
  modified_base 4..4: /mod_base="OTHER" /note="2'-fluoro-nucleotide"
  modified_base 5..5: /mod_base="OTHER" /note="2'-OMe-nucleotide"
  modified_base 6..6: /mod_base="OTHER" /note="2'-fluoro-nucleotide"
  modified_base 7..7: /mod_base="OTHER" /note="2'-OMe-nucleotide"
  modified_base 8..8: /mod_base="OTHER" /note="2'-fluoro-nucleotide"
  modified_base 9..9: /mod_base="OTHER" /note="2'-OMe-nucleotide"
  modified_base 10..10: /mod_base="OTHER" /note="2'-fluoro-nucleotide"
  modified_base 11..11: /mod_base="OTHER" /note="2'-OMe-nucleotide"
  modified_base 12..12: /mod_base="OTHER" /note="2'-fluoro-nucleotide"
  modified_base 13..13: /mod_base="OTHER" /note="2'-OMe-nucleotide"
  modified_base 14..14: /mod_base="OTHER" /note="2'-fluoro-nucleotide"
  modified_base 15..15: /mod_base="OTHER" /note="2'-OMe-nucleotide"
  modified_base 16..16: /mod_base="OTHER" /note="2'-fluoro-nucleotide"
  modified_base 17..17: /mod_base="OTHER" /note="2'-OMe-nucleotide"
  modified_base 18..18: /mod_base="OTHER" /note="2'-fluoro-nucleotide"
  modified_base 19..19: /mod_base="OTHER" /note="2'-OMe-nucleotide"
  modified_base 20..20: /mod_base="OTHER" /note="dT"
  modified_base 21..21: /mod_base="OTHER" /note="dT"
cacuauauccuuuaacaaatt

SEQ ID NO: 764 - DNA, 21 bp, Artificial Sequence
  Description of Artificial Sequence: Synthetic oligonucleotide
  Description of Combined DNA/RNA Molecule: Synthetic oligonucleotide
  N-term hydroxyl group
  C-term hydroxyl group
  modified_base 1..1: /mod_base="OTHER" /note="2'-fluoro-nucleotide"
  modified_base 2..2: /mod_base="OTHER" /note="2'-fluoro-nucleotide"
  modified_base 3..3: /mod_base="OTHER" /note="2'-OMe-nucleotide"
  modified_base 4..4: /mod_base="OTHER" /note="2'-fluoro-nucleotide"
  modified_base 5..5: /mod_base="OTHER" /note="2'-OMe-nucleotide"
  modified_base 6..6: /mod_base="OTHER" /note="2'-fluoro-nucleotide"
  modified_base 7..7: /mod_base="OTHER" /note="2'-OMe-nucleotide"
  modified_base 8..8: /mod_base="OTHER" /note="2'-fluoro-nucleotide"
  modified_base 9..9: /mod_base="OTHER" /note="2'-OMe-nucleotide"
  modified_base 10..10: /mod_base="OTHER" /note="2'-fluoro-nucleotide"
  modified_base 11..11: /mod_base="OTHER" /note="2'-OMe-nucleotide"
  modified_base 12..12: /mod_base="OTHER" /note="2'-fluoro-nucleotide"
  modified_base 13..13: /mod_base="OTHER" /note="2'-OMe-nucleotide"
  modified_base 14..14: /mod_base="OTHER" /note="2'-fluoro-nucleotide"
  modified_base 15..15: /mod_base="OTHER" /note="2'-OMe-nucleotide"
  modified_base 16..16: /mod_base="OTHER" /note="2'-fluoro-nucleotide"
  modified_base 17..17: /mod_base="OTHER" /note="2'-OMe-nucleotide"
  modified_base 18..18: /mod_base="OTHER" /note="2'-fluoro-nucleotide"
  modified_base 19..19: /mod_base="OTHER" /note="2'-OMe-nucleotide"
  modified_base 20..20: /mod_base="OTHER" /note="dT"
  modified_base 21..21: /mod_base="OTHER" /note="dT"
gcacuauauccuuuaacaatt

SEQ ID NO: 765 - DNA, 21 bp, Artificial Sequence
  Description of Artificial Sequence: Synthetic oligonucleotide
  Description of Combined DNA/RNA Molecule: Synthetic oligonucleotide
  N-term hydroxyl group
  C-term hydroxyl group
  modified_base 1..1: /mod_base="OTHER" /note="2'-fluoro-nucleotide"
  modified_base 2..2: /mod_base="OTHER" /note="2'-fluoro-nucleotide"
  modified_base 3..3: /mod_base="OTHER" /note="2'-OMe-nucleotide"
  modified_base 4..4: /mod_base="OTHER" /note="2'-fluoro-nucleotide"
  modified_base 5..5: /mod_base="OTHER" /note="2'-OMe-nucleotide"
  modified_base 6..6: /mod_base="OTHER" /note="2'-fluoro-nucleotide"
  modified_base 7..7: /mod_base="OTHER" /note="2'-OMe-nucleotide"
  modified_base 8..8: /mod_base="OTHER" /note="2'-fluoro-nucleotide"
  modified_base 9..9: /mod_base="OTHER" /note="2'-OMe-nucleotide"
  modified_base 10..10: /mod_base="OTHER" /note="2'-fluoro-nucleotide"
  modified_base 11..11: /mod_base="OTHER" /note="2'-OMe-nucleotide"
  modified_base 12..12: /mod_base="OTHER" /note="2'-fluoro-nucleotide"
  modified_base 13..13: /mod_base="OTHER" /note="2'-OMe-nucleotide"
  modified_base 14..14: /mod_base="OTHER" /note="2'-fluoro-nucleotide"
  modified_base 15..15: /mod_base="OTHER" /note="2'-OMe-nucleotide"
  modified_base 16..16: /mod_base="OTHER" /note="2'-fluoro-nucleotide"
  modified_base 17..17: /mod_base="OTHER" /note="2'-OMe-nucleotide"
  modified_base 18..18: /mod_base="OTHER" /note="2'-fluoro-nucleotide"
  modified_base 19..19: /mod_base="OTHER" /note="2'-OMe-nucleotide"
  modified_base 20..20: /mod_base="OTHER" /note="dT"
  modified_base 21..21: /mod_base="OTHER" /note="dT"
ggcacuauauccuuuaacatt

SEQ ID NO: 766 - DNA, 21 bp, Artificial Sequence
  Description of Artificial Sequence: Synthetic oligonucleotide
  Description of Combined DNA/RNA Molecule: Synthetic oligonucleotide
  N-term hydroxyl group
  C-term hydroxyl group
  modified_base 1..1: /mod_base="OTHER" /note="2'-fluoro-nucleotide"
  modified_base 2..2: /mod_base="OTHER" /note="2'-fluoro-nucleotide"
  modified_base 3..3: /mod_base="OTHER" /note="2'-OMe-nucleotide"
  modified_base 4..4: /mod_base="OTHER" /note="2'-fluoro-nucleotide"
  modified_base 5..5: /mod_base="OTHER" /note="2'-OMe-nucleotide"
  modified_base 6..6: /mod_base="OTHER" /note="2'-fluoro-nucleotide"
  modified_base 7..7: /mod_base="OTHER" /note="2'-OMe-nucleotide"
  modified_base 8..8: /mod_base="OTHER" /note="2'-fluoro-nucleotide"
  modified_base 9..9: /mod_base="OTHER" /note="2'-OMe-nucleotide"
  modified_base 10..10: /mod_base="OTHER" /note="2'-fluoro-nucleotide"
  modified_base 11..11: /mod_base="OTHER" /note="2'-OMe-nucleotide"
  modified_base 12..12: /mod_base="OTHER" /note="2'-fluoro-nucleotide"
  modified_base 13..13: /mod_base="OTHER" /note="2'-OMe-nucleotide"
  modified_base 14..14: /mod_base="OTHER" /note="2'-fluoro-nucleotide"
  modified_base 15..15: /mod_base="OTHER" /note="2'-OMe-nucleotide"
  modified_base 16..16: /mod_base="OTHER" /note="2'-fluoro-nucleotide"
  modified_base 17..17: /mod_base="OTHER" /note="2'-OMe-nucleotide"
  modified_base 18..18: /mod_base="OTHER" /note="2'-fluoro-nucleotide"
  modified_base 19..19: /mod_base="OTHER" /note="2'-OMe-nucleotide"
  modified_base 20..20: /mod_base="OTHER" /note="dT"
  modified_base 21..21: /mod_base="OTHER" /note="dT"
gggcacuauauccuuuaactt

SEQ ID NO: 767 - DNA, 21 bp, Artificial Sequence
  Description of Artificial Sequence: Synthetic oligonucleotide
  Description of Combined DNA/RNA Molecule: Synthetic oligonucleotide
  N-term hydroxyl group
  C-term hydroxyl group
  modified_base 1..1: /mod_base="OTHER" /note="2'-fluoro-nucleotide"
  modified_base 2..2: /mod_base="OTHER" /note="2'-fluoro-nucleotide"
  modified_base 3..3: /mod_base="OTHER" /note="2'-OMe-nucleotide"
  modified_base 4..4: /mod_base="OTHER" /note="2'-fluoro-nucleotide"
  modified_base 5..5: /mod_base="OTHER" /note="2'-OMe-nucleotide"
  modified_base 6..6: /mod_base="OTHER" /note="2'-fluoro-nucleotide"
  modified_base 7..7: /mod_base="OTHER" /note="2'-OMe-nucleotide"
  modified_base 8..8: /mod_base="OTHER" /note="2'-fluoro-nucleotide"
  modified_base 9..9: /mod_base="OTHER" /note="2'-OMe-nucleotide"
  modified_base 10..10: /mod_base="OTHER" /note="2'-fluoro-nucleotide"
  modified_base 11..11: /mod_base="OTHER" /note="2'-OMe-nucleotide"
  modified_base 12..12: /mod_base="OTHER" /note="2'-fluoro-nucleotide"
  modified_base 13..13: /mod_base="OTHER" /note="2'-OMe-nucleotide"
  modified_base 14..14: /mod_base="OTHER" /note="2'-fluoro-nucleotide"
  modified_base 15..15: /mod_base="OTHER" /note="2'-OMe-nucleotide"
  modified_base 16..16: /mod_base="OTHER" /note="2'-fluoro-nucleotide"
  modified_base 17..17: /mod_base="OTHER" /note="2'-OMe-nucleotide"
  modified_base 18..18: /mod_base="OTHER" /note="2'-fluoro-nucleotide"
  modified_base 19..19: /mod_base="OTHER" /note="2'-OMe-nucleotide"
  modified_base 20..20: /mod_base="OTHER" /note="dT"
  modified_base 21..21: /mod_base="OTHER" /note="dT"
ugggcacuauauccuuuaatt

SEQ ID NO: 768 - DNA, 21 bp, Artificial Sequence
  Description of Artificial Sequence: Synthetic oligonucleotide
  Description of Combined DNA/RNA Molecule: Synthetic oligonucleotide
  N-term hydroxyl group
  C-term hydroxyl group
  modified_base 1..1: /mod_base="OTHER" /note="2'-fluoro-nucleotide"
  modified_base 2..2: /mod_base="OTHER" /note="2'-fluoro-nucleotide"
  modified_base 3..3: /mod_base="OTHER" /note="2'-OMe-nucleotide"
  modified_base 4..4: /mod_base="OTHER" /note="2'-fluoro-nucleotide"
  modified_base 5..5: /mod_base="OTHER" /note="2'-OMe-nucleotide"
  modified_base 6..6: /mod_base="OTHER" /note="2'-fluoro-nucleotide"
  modified_base 7..7: /mod_base="OTHER" /note="2'-OMe-nucleotide"
  modified_base 8..8: /mod_base="OTHER" /note="2'-fluoro-nucleotide"
  modified_base 9..9: /mod_base="OTHER" /note="2'-OMe-nucleotide"
  modified_base 10..10: /mod_base="OTHER" /note="2'-fluoro-nucleotide"
  modified_base 11..11: /mod_base="OTHER" /note="2'-OMe-nucleotide"
  modified_base 12..12: /mod_base="OTHER" /note="2'-fluoro-nucleotide"
  modified_base 13..13: /mod_base="OTHER" /note="2'-OMe-nucleotide"
  modified_base 14..14: /mod_base="OTHER" /note="2'-fluoro-nucleotide"
  modified_base 15..15: /mod_base="OTHER" /note="2'-OMe-nucleotide"
  modified_base 16..16: /mod_base="OTHER" /note="2'-fluoro-nucleotide"
  modified_base 17..17: /mod_base="OTHER" /note="2'-OMe-nucleotide"
  modified_base 18..18: /mod_base="OTHER" /note="2'-fluoro-nucleotide"
  modified_base 19..19: /mod_base="OTHER" /note="2'-OMe-nucleotide"
  modified_base 20..20: /mod_base="OTHER" /note="dT"
  modified_base 21..21: /mod_base="OTHER" /note="dT"
uugggcacuauauccuuuatt

SEQ ID NO: 769 - DNA, 21 bp, Artificial Sequence
  Description of Artificial Sequence: Synthetic oligonucleotide
  Description of Combined DNA/RNA Molecule: Synthetic oligonucleotide
  N-term hydroxyl group
  C-term hydroxyl group
  modified_base 1..1: /mod_base="OTHER" /note="2'-fluoro-nucleotide"
  modified_base 2..2: /mod_base="OTHER" /note="2'-fluoro-nucleotide"
  modified_base 3..3: /mod_base="OTHER" /note="2'-OMe-nucleotide"
  modified_base 4..4: /mod_base="OTHER" /note="2'-fluoro-nucleotide"
  modified_base 5..5: /mod_base="OTHER" /note="2'-OMe-nucleotide"
  modified_base 6..6: /mod_base="OTHER" /note="2'-fluoro-nucleotide"
  modified_base 7..7: /mod_base="OTHER" /note="2'-OMe-nucleotide"
  modified_base 8..8: /mod_base="OTHER" /note="2'-fluoro-nucleotide"
  modified_base 9..9: /mod_base="OTHER" /note="2'-OMe-nucleotide"
  modified_base 10..10: /mod_base="OTHER" /note="2'-fluoro-nucleotide"
  modified_base 11..11: /mod_base="OTHER" /note="2'-OMe-nucleotide"
  modified_base 12..12: /mod_base="OTHER" /note="2'-fluoro-nucleotide"
  modified_base 13..13: /mod_base="OTHER" /note="2'-OMe-nucleotide"
  modified_base 14..14: /mod_base="OTHER" /note="2'-fluoro-nucleotide"
  modified_base 15..15: /mod_base="OTHER" /note="2'-OMe-nucleotide"
  modified_base 16..16: /mod_base="OTHER" /note="2'-fluoro-nucleotide"
  modified_base 17..17: /mod_base="OTHER" /note="2'-OMe-nucleotide"
  modified_base 18..18: /mod_base="OTHER" /note="2'-fluoro-nucleotide"
  modified_base 19..19: /mod_base="OTHER" /note="2'-OMe-nucleotide"
  modified_base 20..20: /mod_base="OTHER" /note="dT"
  modified_base 21..21: /mod_base="OTHER" /note="dT"
aacuugggcacuauauccutt

SEQ ID NO: 770 - DNA, 21 bp, Artificial Sequence
  Description of Artificial Sequence: Synthetic oligonucleotide
  Description of Combined DNA/RNA Molecule: Synthetic oligonucleotide
  N-term hydroxyl group
  C-term hydroxyl group
  modified_base 1..1: /mod_base="OTHER" /note="2'-fluoro-nucleotide"
  modified_base 2..2: /mod_base="OTHER" /note="2'-fluoro-nucleotide"
  modified_base 3..3: /mod_base="OTHER" /note="2'-OMe-nucleotide"
  modified_base 4..4: /mod_base="OTHER" /note="2'-fluoro-nucleotide"
  modified_base 5..5: /mod_base="OTHER" /note="2'-OMe-nucleotide"
  modified_base 6..6: /mod_base="OTHER" /note="2'-fluoro-nucleotide"
  modified_base 7..7: /mod_base="OTHER" /note="2'-OMe-nucleotide"
  modified_base 8..8: /mod_base="OTHER" /note="2'-fluoro-nucleotide"
  modified_base 9..9: /mod_base="OTHER" /note="2'-OMe-nucleotide"
  modified_base 10..10: /mod_base="OTHER" /note="2'-fluoro-nucleotide"
  modified_base 11..11: /mod_base="OTHER" /note="2'-OMe-nucleotide"
  modified_base 12..12: /mod_base="OTHER" /note="2'-fluoro-nucleotide"
  modified_base 13..13: /mod_base="OTHER" /note="2'-OMe-nucleotide"
  modified_base 14..14: /mod_base="OTHER" /note="2'-fluoro-nucleotide"
  modified_base 15..15: /mod_base="OTHER" /note="2'-OMe-nucleotide"
  modified_base 16..16: /mod_base="OTHER" /note="2'-fluoro-nucleotide"
  modified_base 17..17: /mod_base="OTHER" /note="2'-OMe-nucleotide"
  modified_base 18..18: /mod_base="OTHER" /note="2'-fluoro-nucleotide"
  modified_base 19..19: /mod_base="OTHER" /note="2'-OMe-nucleotide"
  modified_base 20..20: /mod_base="OTHER" /note="dT"
  modified_base 21..21: /mod_base="OTHER" /note="dT"
uaacuugggcacuauaucctt

SEQ ID NO: 771 - DNA, 21 bp, Artificial Sequence
  Description of Artificial Sequence: Synthetic oligonucleotide
  Description of Combined DNA/RNA Molecule: Synthetic oligonucleotide
  N-term hydroxyl group
  C-term hydroxyl group
  modified_base 1..1: /mod_base="OTHER" /note="2'-fluoro-nucleotide"
  modified_base 2..2: /mod_base="OTHER" /note="2'-fluoro-nucleotide"
  modified_base 3..3: /mod_base="OTHER" /note="2'-OMe-nucleotide"
  modified_base 4..4: /mod_base="OTHER" /note="2'-fluoro-nucleotide"
  modified_base 5..5: /mod_base="OTHER" /note="2'-OMe-nucleotide"
  modified_base 6..6: /mod_base="OTHER" /note="2'-fluoro-nucleotide"
  modified_base 7..7: /mod_base="OTHER" /note="2'-OMe-nucleotide"
  modified_base 8..8: /mod_base="OTHER" /note="2'-fluoro-nucleotide"
  modified_base 9..9: /mod_base="OTHER" /note="2'-OMe-nucleotide"
  modified_base 10..10: /mod_base="OTHER" /note="2'-fluoro-nucleotide"
  modified_base 11..11: /mod_base="OTHER" /note="2'-OMe-nucleotide"
  modified_base 12..12: /mod_base="OTHER" /note="2'-fluoro-nucleotide"
  modified_base 13..13: /mod_base="OTHER" /note="2'-OMe-nucleotide"
  modified_base 14..14: /mod_base="OTHER" /note="2'-fluoro-nucleotide"
  modified_base 15..15: /mod_base="OTHER" /note="2'-OMe-nucleotide"
  modified_base 16..16: /mod_base="OTHER" /note="2'-fluoro-nucleotide"
  modified_base 17..17: /mod_base="OTHER" /note="2'-OMe-nucleotide"
  modified_base 18..18: /mod_base="OTHER" /note="2'-fluoro-nucleotide"
  modified_base 19..19: /mod_base="OTHER" /note="2'-OMe-nucleotide"
  modified_base 20..20: /mod_base="OTHER" /note="dT"
  modified_base 21..21: /mod_base="OTHER" /note="dT"
auaacuugggcacuauauctt

SEQ ID NO: 772 - DNA, 21 bp, Artificial Sequence
  Description of Artificial Sequence: Synthetic oligonucleotide
  Description of Combined DNA/RNA Molecule: Synthetic oligonucleotide
  N-term hydroxyl group
  C-term hydroxyl group
  modified_base 1..1: /mod_base="OTHER" /note="2'-fluoro-nucleotide"
  modified_base 2..2: /mod_base="OTHER" /note="2'-fluoro-nucleotide"
  modified_base 3..3: /mod_base="OTHER" /note="2'-OMe-nucleotide"
  modified_base 4..4: /mod_base="OTHER" /note="2'-fluoro-nucleotide"
  modified_base 5..5: /mod_base="OTHER" /note="2'-OMe-nucleotide"
  modified_base 6..6: /mod_base="OTHER" /note="2'-fluoro-nucleotide"
  modified_base 7..7: /mod_base="OTHER" /note="2'-OMe-nucleotide"
  modified_base 8..8: /mod_base="OTHER" /note="2'-fluoro-nucleotide"
  modified_base 9..9: /mod_base="OTHER" /note="2'-OMe-nucleotide"
  modified_base 10..10: /mod_base="OTHER" /note="2'-fluoro-nucleotide"
  modified_base 11..11: /mod_base="OTHER" /note="2'-OMe-nucleotide"
  modified_base 12..12: /mod_base="OTHER" /note="2'-fluoro-nucleotide"
  modified_base 13..13: /mod_base="OTHER" /note="2'-OMe-nucleotide"
  modified_base 14..14: /mod_base="OTHER" /note="2'-fluoro-nucleotide"
  modified_base 15..15: /mod_base="OTHER" /note="2'-OMe-nucleotide"
  modified_base 16..16: /mod_base="OTHER" /note="2'-fluoro-nucleotide"
  modified_base 17..17: /mod_base="OTHER" /note="2'-OMe-nucleotide"
  modified_base 18..18: /mod_base="OTHER" /note="2'-fluoro-nucleotide"
  modified_base 19..19: /mod_base="OTHER" /note="2'-OMe-nucleotide"
  modified_base 20..20: /mod_base="OTHER" /note="dT"
  modified_base 21..21: /mod_base="OTHER" /note="dT"
uauaacuugggcacuauautt

SEQ ID NO: 773 - DNA, 21 bp, Artificial Sequence
  Description of Artificial Sequence: Synthetic oligonucleotide
  Description of Combined DNA/RNA Molecule: Synthetic oligonucleotide
  N-term hydroxyl group
  C-term hydroxyl group
  modified_base 1..1: /mod_base="OTHER" /note="2'-fluoro-nucleotide"
  modified_base 2..2: /mod_base="OTHER" /note="2'-fluoro-nucleotide"
  modified_base 3..3: /mod_base="OTHER" /note="2'-OMe-nucleotide"
  modified_base 4..4: /mod_base="OTHER" /note="2'-fluoro-nucleotide"
  modified_base 5..5: /mod_base="OTHER" /note="2'-OMe-nucleotide"
  modified_base 6..6: /mod_base="OTHER" /note="2'-fluoro-nucleotide"
  modified_base 7..7: /mod_base="OTHER" /note="2'-OMe-nucleotide"
  modified_base 8..8: /mod_base="OTHER" /note="2'-fluoro-nucleotide"
  modified_base 9..9: /mod_base="OTHER" /note="2'-OMe-nucleotide"
  modified_base 10..10: /mod_base="OTHER" /note="2'-fluoro-nucleotide"
  modified_base 11..11: /mod_base="OTHER" /note="2'-OMe-nucleotide"
  modified_base 12..12: /mod_base="OTHER" /note="2'-fluoro-nucleotide"
  modified_base 13..13: /mod_base="OTHER" /note="2'-OMe-nucleotide"
  modified_base 14..14: /mod_base="OTHER" /note="2'-fluoro-nucleotide"
  modified_base 15..15: /mod_base="OTHER" /note="2'-OMe-nucleotide"
  modified_base 16..16: /mod_base="OTHER" /note="2'-fluoro-nucleotide"
  modified_base 17..17: /mod_base="OTHER" /note="2'-OMe-nucleotide"
  modified_base 18..18: /mod_base="OTHER" /note="2'-fluoro-nucleotide"
  modified_base 19..19: /mod_base="OTHER" /note="2'-OMe-nucleotide"
  modified_base 20..20: /mod_base="OTHER" /note="dT"
  modified_base 21..21: /mod_base="OTHER" /note="dT"
uugacaaagguaggucacctt

SEQ ID NO: 774 - DNA, 21 bp, Artificial Sequence
  Description of Artificial Sequence: Synthetic oligonucleotide
  Description of Combined DNA/RNA Molecule: Synthetic oligonucleotide
  N-term hydroxyl group
  C-term hydroxyl group
  modified_base 1..1: /mod_base="OTHER" /note="2'-fluoro-nucleotide"
  modified_base 2..2: /mod_base="OTHER" /note="2'-fluoro-nucleotide"
  modified_base 3..3: /mod_base="OTHER" /note="2'-OMe-nucleotide"
  modified_base 4..4: /mod_base="OTHER" /note="2'-fluoro-nucleotide"
  modified_base 5..5: /mod_base="OTHER" /note="2'-OMe-nucleotide"
  modified_base 6..6: /mod_base="OTHER" /note="2'-fluoro-nucleotide"
  modified_base 7..7: /mod_base="OTHER" /note="2'-OMe-nucleotide"
  modified_base 8..8: /mod_base="OTHER" /note="2'-fluoro-nucleotide"
  modified_base 9..9: /mod_base="OTHER" /note="2'-OMe-nucleotide"
  modified_base 10..10: /mod_base="OTHER" /note="2'-fluoro-nucleotide"
  modified_base 11..11: /mod_base="OTHER" /note="2'-OMe-nucleotide"
  modified_base 12..12: /mod_base="OTHER" /note="2'-fluoro-nucleotide"
  modified_base 13..13: /mod_base="OTHER" /note="2'-OMe-nucleotide"
  modified_base 14..14: /mod_base="OTHER" /note="2'-fluoro-nucleotide"
  modified_base 15..15: /mod_base="OTHER" /note="2'-OMe-nucleotide"
  modified_base 16..16: /mod_base="OTHER" /note="2'-fluoro-nucleotide"
  modified_base 17..17: /mod_base="OTHER" /note="2'-OMe-nucleotide"
  modified_base 18..18: /mod_base="OTHER" /note="2'-fluoro-nucleotide"
  modified_base 19..19: /mod_base="OTHER" /note="2'-OMe-nucleotide"
  modified_base 20..20: /mod_base="OTHER" /note="dT"
  modified_base 21..21: /mod_base="OTHER" /note="dT"
auugacaaagguaggucactt

SEQ ID NO: 775 - DNA, 21 bp, Artificial Sequence
  Description of Artificial Sequence: Synthetic oligonucleotide
  Description of Combined DNA/RNA Molecule: Synthetic oligonucleotide
  N-term hydroxyl group
  C-term hydroxyl group
  modified_base 1..1: /mod_base="OTHER" /note="2'-fluoro-nucleotide"
  modified_base 2..2: /mod_base="OTHER" /note="2'-fluoro-nucleotide"
  modified_base 3..3: /mod_base="OTHER" /note="2'-OMe-nucleotide"
  modified_base 4..4: /mod_base="OTHER" /note="2'-fluoro-nucleotide"
  modified_base 5..5: /mod_base="OTHER" /note="2'-OMe-nucleotide"
  modified_base 6..6: /mod_base="OTHER" /note="2'-fluoro-nucleotide"
  modified_base 7..7: /mod_base="OTHER" /note="2'-OMe-nucleotide"
  modified_base 8..8: /mod_base="OTHER" /note="2'-fluoro-nucleotide"
  modified_base 9..9: /mod_base="OTHER" /note="2'-OMe-nucleotide"
  modified_base 10..10: /mod_base="OTHER" /note="2'-fluoro-nucleotide"
  modified_base 11..11: /mod_base="OTHER" /note="2'-OMe-nucleotide"
  modified_base 12..12: /mod_base="OTHER" /note="2'-fluoro-nucleotide"
  modified_base 13..13: /mod_base="OTHER" /note="2'-OMe-nucleotide"
  modified_base 14..14: /mod_base="OTHER" /note="2'-fluoro-nucleotide"
  modified_base 15..15: /mod_base="OTHER" /note="2'-OMe-nucleotide"
  modified_base 16..16: /mod_base="OTHER" /note="2'-fluoro-nucleotide"
  modified_base 17..17: /mod_base="OTHER" /note="2'-OMe-nucleotide"
  modified_base 18..18: /mod_base="OTHER" /note="2'-fluoro-nucleotide"
  modified_base 19..19: /mod_base="OTHER" /note="2'-OMe-nucleotide"
  modified_base 20..20: /mod_base="OTHER" /note="dT"
  modified_base 21..21: /mod_base="OTHER" /note="dT"
uauugacaaagguaggucatt

SEQ ID NO: 776 - DNA, 21 bp, Artificial Sequence
  Description of Artificial Sequence: Synthetic oligonucleotide
  Description of Combined DNA/RNA Molecule: Synthetic oligonucleotide
  N-term hydroxyl group
  C-term hydroxyl group
  modified_base 1..1: /mod_base="OTHER" /note="2'-fluoro-nucleotide"
  modified_base 2..2: /mod_base="OTHER" /note="2'-fluoro-nucleotide"
  modified_base 3..3: /mod_base="OTHER" /note="2'-OMe-nucleotide"
  modified_base 4..4: /mod_base="OTHER" /note="2'-fluoro-nucleotide"
  modified_base 5..5: /mod_base="OTHER" /note="2'-OMe-nucleotide"
  modified_base 6..6: /mod_base="OTHER" /note="2'-fluoro-nucleotide"
  modified_base 7..7: /mod_base="OTHER" /note="2'-OMe-nucleotide"
  modified_base 8..8: /mod_base="OTHER" /note="2'-fluoro-nucleotide"
  modified_base 9..9: /mod_base="OTHER" /note="2'-OMe-nucleotide"
  modified_base 10..10: /mod_base="OTHER" /note="2'-fluoro-nucleotide"
  modified_base 11..11: /mod_base="OTHER" /note="2'-OMe-nucleotide"
  modified_base 12..12: /mod_base="OTHER" /note="2'-fluoro-nucleotide"
  modified_base 13..13: /mod_base="OTHER" /note="2'-OMe-nucleotide"
  modified_base 14..14: /mod_base="OTHER" /note="2'-fluoro-nucleotide"
  modified_base 15..15: /mod_base="OTHER" /note="2'-OMe-nucleotide"
  modified_base 16..16: /mod_base="OTHER" /note="2'-fluoro-nucleotide"
  modified_base 17..17: /mod_base="OTHER" /note="2'-OMe-nucleotide"
  modified_base 18..18: /mod_base="OTHER" /note="2'-fluoro-nucleotide"
  modified_base 19..19: /mod_base="OTHER" /note="2'-OMe-nucleotide"
  modified_base 20..20: /mod_base="OTHER" /note="dT"
  modified_base 21..21: /mod_base="OTHER" /note="dT"
uggauaauuugaaauacautt

SEQ ID NO: 777 - DNA, 21 bp, Artificial Sequence
  Description of Artificial Sequence: Synthetic oligonucleotide
  Description of Combined DNA/RNA Molecule: Synthetic oligonucleotide
  N-term hydroxyl group
  C-term hydroxyl group
  modified_base 1..1: /mod_base="OTHER" /note="2'-fluoro-nucleotide"
  modified_base 2..2: /mod_base="OTHER" /note="2'-fluoro-nucleotide"
  modified_base 3..3: /mod_base="OTHER" /note="2'-OMe-nucleotide"
  modified_base 4..4: /mod_base="OTHER" /note="2'-fluoro-nucleotide"
  modified_base 5..5: /mod_base="OTHER" /note="2'-OMe-nucleotide"
  modified_base 6..6: /mod_base="OTHER" /note="2'-fluoro-nucleotide"
  modified_base 7..7: /mod_base="OTHER" /note="2'-OMe-nucleotide"
  modified_base 8..8: /mod_base="OTHER" /note="2'-fluoro-nucleotide"
  modified_base 9..9: /mod_base="OTHER" /note="2'-OMe-nucleotide"
  modified_base 10..10: /mod_base="OTHER" /note="2'-fluoro-nucleotide"
  modified_base 11..11: /mod_base="OTHER" /note="2'-OMe-nucleotide"
  modified_base 12..12: /mod_base="OTHER" /note="2'-fluoro-nucleotide"
  modified_base 13..13: /mod_base="OTHER" /note="2'-OMe-nucleotide"
  modified_base 14..14: /mod_base="OTHER" /note="2'-fluoro-nucleotide"
  modified_base 15..15: /mod_base="OTHER" /note="2'-OMe-nucleotide"
  modified_base 16..16: /mod_base="OTHER" /note="2'-fluoro-nucleotide"
  modified_base 17..17: /mod_base="OTHER" /note="2'-OMe-nucleotide"
  modified_base 18..18: /mod_base="OTHER" /note="2'-fluoro-nucleotide"
  modified_base 19..19: /mod_base="OTHER" /note="2'-OMe-nucleotide"
  modified_base 20..20: /mod_base="OTHER" /note="dT"
  modified_base 21..21: /mod_base="OTHER" /note="dT"
guauauuggauaauuugaatt

SEQ ID NO: 778 - DNA, 21 bp, Artificial Sequence
  Description of Artificial Sequence: Synthetic oligonucleotide
  Description of Combined DNA/RNA Molecule: Synthetic oligonucleotide
  N-term hydroxyl group
  C-term hydroxyl group
  modified_base 1..1: /mod_base="OTHER" /note="2'-fluoro-nucleotide"
  modified_base 2..2: /mod_base="OTHER" /note="2'-fluoro-nucleotide"
  modified_base 3..3: /mod_base="OTHER" /note="2'-OMe-nucleotide"
  modified_base 4..4: /mod_base="OTHER" /note="2'-fluoro-nucleotide"
  modified_base 5..5: /mod_base="OTHER" /note="2'-OMe-nucleotide"
  modified_base 6..6: /mod_base="OTHER" /note="2'-fluoro-nucleotide"
  modified_base 7..7: /mod_base="OTHER" /note="2'-OMe-nucleotide"
  modified_base 8..8: /mod_base="OTHER" /note="2'-fluoro-nucleotide"
  modified_base 9..9: /mod_base="OTHER" /note="2'-OMe-nucleotide"
  modified_base 10..10: /mod_base="OTHER" /note="2'-fluoro-nucleotide"
  modified_base 11..11: /mod_base="OTHER" /note="2'-OMe-nucleotide"
  modified_base 12..12: /mod_base="OTHER" /note="2'-fluoro-nucleotide"
  modified_base 13..13: /mod_base="OTHER" /note="2'-OMe-nucleotide"
  modified_base 14..14: /mod_base="OTHER" /note="2'-fluoro-nucleotide"
  modified_base 15..15: /mod_base="OTHER" /note="2'-OMe-nucleotide"
  modified_base 16..16: /mod_base="OTHER" /note="2'-fluoro-nucleotide"
  modified_base 17..17: /mod_base="OTHER" /note="2'-OMe-nucleotide"
  modified_base 18..18: /mod_base="OTHER" /note="2'-fluoro-nucleotide"
  modified_base 19..19: /mod_base="OTHER" /note="2'-OMe-nucleotide"
  modified_base 20..20: /mod_base="OTHER" /note="dT"
  modified_base 21..21: /mod_base="OTHER" /note="dT"
uguauauuggauaauuugatt

SEQ ID NO: 779 - DNA, 21 bp, Artificial Sequence
  Description of Artificial Sequence: Synthetic oligonucleotide
  Description of Combined DNA/RNA Molecule: Synthetic oligonucleotide
  N-term hydroxyl group
  C-term hydroxyl group
  modified_base 1..1: /mod_base="OTHER" /note="2'-fluoro-nucleotide"
  modified_base 2..2: /mod_base="OTHER" /note="2'-fluoro-nucleotide"
  modified_base 3..3: /mod_base="OTHER" /note="2'-OMe-nucleotide"
  modified_base 4..4: /mod_base="OTHER" /note="2'-fluoro-nucleotide"
  modified_base 5..5: /mod_base="OTHER" /note="2'-OMe-nucleotide"
  modified_base 6..6: /mod_base="OTHER" /note="2'-fluoro-nucleotide"
  modified_base 7..7: /mod_base="OTHER" /note="2'-OMe-nucleotide"
  modified_base 8..8: /mod_base="OTHER" /note="2'-fluoro-nucleotide"
  modified_base 9..9: /mod_base="OTHER" /note="2'-OMe-nucleotide"
  modified_base 10..10: /mod_base="OTHER" /note="2'-fluoro-nucleotide"
  modified_base 11..11: /mod_base="OTHER" /note="2'-OMe-nucleotide"
  modified_base 12..12: /mod_base="OTHER" /note="2'-fluoro-nucleotide"
  modified_base 13..13: /mod_base="OTHER" /note="2'-OMe-nucleotide"
  modified_base 14..14: /mod_base="OTHER" /note="2'-fluoro-nucleotide"
  modified_base 15..15: /mod_base="OTHER" /note="2'-OMe-nucleotide"
  modified_base 16..16: /mod_base="OTHER" /note="2'-fluoro-nucleotide"
  modified_base 17..17: /mod_base="OTHER" /note="2'-OMe-nucleotide"
  modified_base 18..18: /mod_base="OTHER" /note="2'-fluoro-nucleotide"
  modified_base 19..19: /mod_base="OTHER" /note="2'-OMe-nucleotide"
  modified_base 20..20: /mod_base="OTHER" /note="dT"
  modified_base 21..21: /mod_base="OTHER" /note="dT"
gacauguauauuggauaautt

SEQ ID NO: 780 - DNA, 21 bp, Artificial Sequence
  Description of Artificial Sequence: Synthetic oligonucleotide
  Description of Combined DNA/RNA Molecule: Synthetic oligonucleotide
  N-term hydroxyl group
  C-term hydroxyl group
  modified_base 1..1: /mod_base="OTHER" /note="2'-fluoro-nucleotide"
  modified_base 2..2: /mod_base="OTHER" /note="2'-fluoro-nucleotide"
  modified_base 3..3: /mod_base="OTHER" /note="2'-OMe-nucleotide"
  modified_base 4..4: /mod_base="OTHER" /note="2'-fluoro-nucleotide"
  modified_base 5..5: /mod_base="OTHER" /note="2'-OMe-nucleotide"
  modified_base 6..6: /mod_base="OTHER" /note="2'-fluoro-nucleotide"
  modified_base 7..7: /mod_base="OTHER" /note="2'-OMe-nucleotide"
  modified_base 8..8: /mod_base="OTHER" /note="2'-fluoro-nucleotide"
  modified_base 9..9: /mod_base="OTHER" /note="2'-OMe-nucleotide"
  modified_base 10..10: /mod_base="OTHER" /note="2'-fluoro-nucleotide"
  modified_base 11..11: /mod_base="OTHER" /note="2'-OMe-nucleotide"
  modified_base 12..12: /mod_base="OTHER" /note="2'-fluoro-nucleotide"
  modified_base 13..13: /mod_base="OTHER" /note="2'-OMe-nucleotide"
  modified_base 14..14: /mod_base="OTHER" /note="2'-fluoro-nucleotide"
  modified_base 15..15: /mod_base="OTHER" /note="2'-OMe-nucleotide"
  modified_base 16..16: /mod_base="OTHER" /note="2'-fluoro-nucleotide"
  modified_base 17..17: /mod_base="OTHER" /note="2'-OMe-nucleotide"
  modified_base 18..18: /mod_base="OTHER" /note="2'-fluoro-nucleotide"
  modified_base 19..19: /mod_base="OTHER" /note="2'-OMe-nucleotide"
  modified_base 20..20: /mod_base="OTHER" /note="dT"
  modified_base 21..21: /mod_base="OTHER" /note="dT"
ugacauguauauuggauaatt

SEQ ID NO: 781 - DNA, 21 bp, Artificial Sequence
  Description of Artificial Sequence: Synthetic oligonucleotide
  Description of Combined DNA/RNA Molecule: Synthetic oligonucleotide
  N-term hydroxyl group
  C-term hydroxyl group
  modified_base 1..1: /mod_base="OTHER" /note="2'-fluoro-nucleotide"
  modified_base 2..2: /mod_base="OTHER" /note="2'-fluoro-nucleotide"
  modified_base 3..3: /mod_base="OTHER" /note="2'-OMe-nucleotide"
  modified_base 4..4: /mod_base="OTHER" /note="2'-fluoro-nucleotide"
  modified_base 5..5: /mod_base="OTHER" /note="2'-OMe-nucleotide"
  modified_base 6..6: /mod_base="OTHER" /note="2'-fluoro-nucleotide"
  modified_base 7..7: /mod_base="OTHER" /note="2'-OMe-nucleotide"
  modified_base 8..8: /mod_base="OTHER" /note="2'-fluoro-nucleotide"
  modified_base 9..9: /mod_base="OTHER" /note="2'-OMe-nucleotide"
  modified_base 10..10: /mod_base="OTHER" /note="2'-fluoro-nucleotide"
  modified_base 11..11: /mod_base="OTHER" /note="2'-OMe-nucleotide"
  modified_base 12..12: /mod_base="OTHER" /note="2'-fluoro-nucleotide"
  modified_base 13..13: /mod_base="OTHER" /note="2'-OMe-nucleotide"
  modified_base 14..14: /mod_base="OTHER" /note="2'-fluoro-nucleotide"
  modified_base 15..15: /mod_base="OTHER" /note="2'-OMe-nucleotide"
  modified_base 16..16: /mod_base="OTHER" /note="2'-fluoro-nucleotide"
  modified_base 17..17: /mod_base="OTHER" /note="2'-OMe-nucleotide"
  modified_base 18..18: /mod_base="OTHER" /note="2'-fluoro-nucleotide"
  modified_base 19..19: /mod_base="OTHER" /note="2'-OMe-nucleotide"
  modified_base 20..20: /mod_base="OTHER" /note="dT"
  modified_base 21..21: /mod_base="OTHER" /note="dT"
augacauguauauuggauatt

SEQ ID NO: 782 - DNA, 21 bp, Artificial Sequence
  Description of Artificial Sequence: Synthetic oligonucleotide
  Description of Combined DNA/RNA Molecule: Synthetic oligonucleotide
  N-term hydroxyl group
  C-term hydroxyl group
  modified_base 1..1: /mod_base="OTHER" /note="2'-fluoro-nucleotide"
  modified_base 2..2: /mod_base="OTHER" /note="2'-fluoro-nucleotide"
  modified_base 3..3: /mod_base="OTHER" /note="2'-OMe-nucleotide"
  modified_base 4..4: /mod_base="OTHER" /note="2'-fluoro-nucleotide"
  modified_base 5..5: /mod_base="OTHER" /note="2'-OMe-nucleotide"
  modified_base 6..6: /mod_base="OTHER" /note="2'-fluoro-nucleotide"
  modified_base 7..7: /mod_base="OTHER" /note="2'-OMe-nucleotide"
  modified_base 8..8: /mod_base="OTHER" /note="2'-fluoro-nucleotide"
  modified_base 9..9: /mod_base="OTHER" /note="2'-OMe-nucleotide"
  modified_base 10..10: /mod_base="OTHER" /note="2'-fluoro-nucleotide"
  modified_base 11..11: /mod_base="OTHER" /note="2'-OMe-nucleotide"
  modified_base 12..12: /mod_base="OTHER" /note="2'-fluoro-nucleotide"
  modified_base 13..13: /mod_base="OTHER" /note="2'-OMe-nucleotide"
  modified_base 14..14: /mod_base="OTHER" /note="2'-fluoro-nucleotide"
  modified_base 15..15: /mod_base="OTHER" /note="2'-OMe-nucleotide"
  modified_base 16..16: /mod_base="OTHER" /note="2'-fluoro-nucleotide"
  modified_base 17..17: /mod_base="OTHER" /note="2'-OMe-nucleotide"
  modified_base 18..18: /mod_base="OTHER" /note="2'-fluoro-nucleotide"
  modified_base 19..19: /mod_base="OTHER" /note="2'-OMe-nucleotide"
  modified_base 20..20: /mod_base="OTHER" /note="dT"
  modified_base 21..21: /mod_base="OTHER" /note="dT"
uaaaaauauauaugacaugtt

SEQ ID NO: 783 - DNA, 21 bp, Artificial Sequence
  Description of Artificial Sequence: Synthetic oligonucleotide
  Description of Combined DNA/RNA Molecule: Synthetic oligonucleotide
  N-term hydroxyl group
  C-term hydroxyl group
  modified_base 1..1: /mod_base="OTHER" /note="2'-fluoro-nucleotide"
  modified_base 2..2: /mod_base="OTHER" /note="2'-fluoro-nucleotide"
  modified_base 3..3: /mod_base="OTHER" /note="2'-OMe-nucleotide"
  modified_base 4..4: /mod_base="OTHER" /note="2'-fluoro-nucleotide"
  modified_base 5..5: /mod_base="OTHER" /note="2'-OMe-nucleotide"
  modified_base 6..6: /mod_base="OTHER" /note="2'-fluoro-nucleotide"
  modified_base 7..7: /mod_base="OTHER" /note="2'-OMe-nucleotide"
  modified_base 8..8: /mod_base="OTHER" /note="2'-fluoro-nucleotide"
  modified_base 9..9: /mod_base="OTHER" /note="2'-OMe-nucleotide"
  modified_base 10..10: /mod_base="OTHER" /note="2'-fluoro-nucleotide"
  modified_base 11..11: /mod_base="OTHER" /note="2'-OMe-nucleotide"
  modified_base 12..12: /mod_base="OTHER" /note="2'-fluoro-nucleotide"
  modified_base 13..13: /mod_base="OTHER" /note="2'-OMe-nucleotide"
  modified_base 14..14: /mod_base="OTHER" /note="2'-fluoro-nucleotide"
  modified_base 15..15: /mod_base="OTHER" /note="2'-OMe-nucleotide"
  modified_base 16..16: /mod_base="OTHER" /note="2'-fluoro-nucleotide"
  modified_base 17..17: /mod_base="OTHER" /note="2'-OMe-nucleotide"
  modified_base 18..18: /mod_base="OTHER" /note="2'-fluoro-nucleotide"
  modified_base 19..19: /mod_base="OTHER" /note="2'-OMe-nucleotide"
  modified_base 20..20: /mod_base="OTHER" /note="dT"
  modified_base 21..21: /mod_base="OTHER" /note="dT"
accuuuauuauuuuguacutt

SEQ ID NO: 784 - DNA, 21 bp, Artificial Sequence
  Description of Artificial Sequence: Synthetic oligonucleotide
  Description of Combined DNA/RNA Molecule: Synthetic oligonucleotide
  N-term hydroxyl group
  C-term hydroxyl group
  modified_base 1..1: /mod_base="OTHER" /note="2'-fluoro-nucleotide"
  modified_base 2..2: /mod_base="OTHER" /note="2'-fluoro-nucleotide"
  modified_base 3..3: /mod_base="OTHER" /note="2'-OMe-nucleotide"
  modified_base 4..4: /mod_base="OTHER" /note="2'-fluoro-nucleotide"
  modified_base 5..5: /mod_base="OTHER" /note="2'-OMe-nucleotide"
  modified_base 6..6: /mod_base="OTHER" /note="2'-fluoro-nucleotide"
  modified_base 7..7: /mod_base="OTHER" /note="2'-OMe-nucleotide"
  modified_base 8..8: /mod_base="OTHER" /note="2'-fluoro-nucleotide"
  modified_base 9..9: /mod_base="OTHER" /note="2'-OMe-nucleotide"
  modified_base 10..10: /mod_base="OTHER" /note="2'-fluoro-nucleotide"
  modified_base 11..11: /mod_base="OTHER" /note="2'-OMe-nucleotide"
  modified_base 12..12: /mod_base="OTHER" /note="2'-fluoro-nucleotide"
  modified_base 13..13: /mod_base="OTHER" /note="2'-OMe-nucleotide"
  modified_base 14..14: /mod_base="OTHER" /note="2'-fluoro-nucleotide"
  modified_base 15..15: /mod_base="OTHER" /note="2'-OMe-nucleotide"
  modified_base 16..16: /mod_base="OTHER" /note="2'-fluoro-nucleotide"
  modified_base 17..17: /mod_base="OTHER" /note="2'-OMe-nucleotide"
  modified_base 18..18: /mod_base="OTHER" /note="2'-fluoro-nucleotide"
  modified_base 19..19: /mod_base="OTHER" /note="2'-OMe-nucleotide"
  modified_base 20..20: /mod_base="OTHER" /note="dT"
  modified_base 21..21: /mod_base="OTHER" /note="dT"
uaccuuuauuauuuuguactt

SEQ ID NO: 785 - DNA, 21 bp, Artificial Sequence
  Description of Artificial Sequence: Synthetic oligonucleotide
  Description of Combined DNA/RNA Molecule: Synthetic oligonucleotide
  N-term hydroxyl group
  C-term hydroxyl group
  modified_base 1..1: /mod_base="OTHER" /note="2'-fluoro-nucleotide"
  modified_base 2..2: /mod_base="OTHER" /note="2'-fluoro-nucleotide"
  modified_base 3..3: /mod_base="OTHER" /note="2'-OMe-nucleotide"
  modified_base 4..4: /mod_base="OTHER" /note="2'-fluoro-nucleotide"
  modified_base 5..5: /mod_base="OTHER" /note="2'-OMe-nucleotide"
  modified_base 6..6: /mod_base="OTHER" /note="2'-fluoro-nucleotide"
  modified_base 7..7: /mod_base="OTHER" /note="2'-OMe-nucleotide"
  modified_base 8..8: /mod_base="OTHER" /note="2'-fluoro-nucleotide"
  modified_base 9..9: /mod_base="OTHER" /note="2'-OMe-nucleotide"
  modified_base 10..10: /mod_base="OTHER" /note="2'-fluoro-nucleotide"
  modified_base 11..11: /mod_base="OTHER" /note="2'-OMe-nucleotide"
  modified_base 12..12: /mod_base="OTHER" /note="2'-fluoro-nucleotide"
  modified_base 13..13: /mod_base="OTHER" /note="2'-OMe-nucleotide"
  modified_base 14..14: /mod_base="OTHER" /note="2'-fluoro-nucleotide"
  modified_base 15..15: /mod_base="OTHER" /note="2'-OMe-nucleotide"
  modified_base 16..16: /mod_base="OTHER" /note="2'-fluoro-nucleotide"
  modified_base 17..17: /mod_base="OTHER" /note="2'-OMe-nucleotide"
  modified_base 18..18: /mod_base="OTHER" /note="2'-fluoro-nucleotide"
  modified_base 19..19: /mod_base="OTHER" /note="2'-OMe-nucleotide"
  modified_base 20..20: /mod_base="OTHER" /note="dT"
  modified_base 21..21: /mod_base="OTHER" /note="dT"
cugugguccugaaaauuautt

SEQ ID NO: 786 - DNA, 21 bp, Artificial Sequence
  Description of Artificial Sequence: Synthetic oligonucleotide
  Description of Combined DNA/RNA Molecule: Synthetic oligonucleotide
  N-term hydroxyl group
  C-term hydroxyl group
  modified_base 1..1: /mod_base="OTHER" /note="2'-fluoro-nucleotide"
  modified_base 2..2: /mod_base="OTHER" /note="2'-fluoro-nucleotide"
  modified_base 3..3: /mod_base="OTHER" /note="2'-OMe-nucleotide"
  modified_base 4..4: /mod_base="OTHER" /note="2'-fluoro-nucleotide"
  modified_base 5..5: /mod_base="OTHER" /note="2'-OMe-nucleotide"
  modified_base 6..6: /mod_base="OTHER" /note="2'-fluoro-nucleotide"
  modified_base 7..7: /mod_base="OTHER" /note="2'-OMe-nucleotide"
  modified_base 8..8: /mod_base="OTHER" /note="2'-fluoro-nucleotide"
  modified_base 9..9: /mod_base="OTHER" /note="2'-OMe-nucleotide"
  modified_base 10..10: /mod_base="OTHER" /note="2'-fluoro-nucleotide"
  modified_base 11..11: /mod_base="OTHER" /note="2'-OMe-nucleotide"
  modified_base 12..12: /mod_base="OTHER" /note="2'-fluoro-nucleotide"
  modified_base 13..13: /mod_base="OTHER" /note="2'-OMe-nucleotide"
  modified_base 14..14: /mod_base="OTHER" /note="2'-fluoro-nucleotide"
  modified_base 15..15: /mod_base="OTHER" /note="2'-OMe-nucleotide"
  modified_base 16..16: /mod_base="OTHER" /note="2'-fluoro-nucleotide"
  modified_base 17..17: /mod_base="OTHER" /note="2'-OMe-nucleotide"
  modified_base 18..18: /mod_base="OTHER" /note="2'-fluoro-nucleotide"
  modified_base 19..19: /mod_base="OTHER" /note="2'-OMe-nucleotide"
  modified_base 20..20: /mod_base="OTHER" /note="dT"
  modified_base 21..21: /mod_base="OTHER" /note="dT"
gucugugguccugaaaauutt

SEQ ID NO: 787 - DNA, 21 bp, Artificial Sequence
  Description of Artificial Sequence: Synthetic oligonucleotide
  Description of Combined DNA/RNA Molecule: Synthetic oligonucleotide
  N-term hydroxyl group
  C-term hydroxyl group
  modified_base 1..1: /mod_base="OTHER" /note="2'-fluoro-nucleotide"
  modified_base 2..2: /mod_base="OTHER" /note="2'-fluoro-nucleotide"
  modified_base 3..3: /mod_base="OTHER" /note="2'-OMe-nucleotide"
  modified_base 4..4: /mod_base="OTHER" /note="2'-fluoro-nucleotide"
  modified_base 5..5: /mod_base="OTHER" /note="2'-OMe-nucleotide"
  modified_base 6..6: /mod_base="OTHER" /note="2'-fluoro-nucleotide"
  modified_base 7..7: /mod_base="OTHER" /note="2'-OMe-nucleotide"
  modified_base 8..8: /mod_base="OTHER" /note="2'-fluoro-nucleotide"
  modified_base 9..9: /mod_base="OTHER" /note="2'-OMe-nucleotide"
  modified_base 10..10: /mod_base="OTHER" /note="2'-fluoro-nucleotide"
  modified_base 11..11: /mod_base="OTHER" /note="2'-OMe-nucleotide"
  modified_base 12..12: /mod_base="OTHER" /note="2'-fluoro-nucleotide"
  modified_base 13..13: /mod_base="OTHER" /note="2'-OMe-nucleotide"
  modified_base 14..14: /mod_base="OTHER" /note="2'-fluoro-nucleotide"
  modified_base 15..15: /mod_base="OTHER" /note="2'-OMe-nucleotide"
  modified_base 16..16: /mod_base="OTHER" /note="2'-fluoro-nucleotide"
  modified_base 17..17: /mod_base="OTHER" /note="2'-OMe-nucleotide"
  modified_base 18..18: /mod_base="OTHER" /note="2'-fluoro-nucleotide"
  modified_base 19..19: /mod_base="OTHER" /note="2'-OMe-nucleotide"
  modified_base 20..20: /mod_base="OTHER" /note="dT"
  modified_base 21..21: /mod_base="OTHER" /note="dT"
uagucugugguccugaaaatt

SEQ ID NO: 788 - DNA, 21 bp, Artificial Sequence
  Description of Artificial Sequence: Synthetic oligonucleotide
  Description of Combined DNA/RNA Molecule: Synthetic oligonucleotide
  N-term hydroxyl group
  C-term hydroxyl group
  modified_base 1..1: /mod_base="OTHER" /note="2'-fluoro-nucleotide"
  modified_base 2..2: /mod_base="OTHER" /note="2'-fluoro-nucleotide"
  modified_base 3..3: /mod_base="OTHER" /note="2'-OMe-nucleotide"
  modified_base 4..4: /mod_base="OTHER" /note="2'-fluoro-nucleotide"
  modified_base 5..5: /mod_base="OTHER" /note="2'-OMe-nucleotide"
  modified_base 6..6: /mod_base="OTHER" /note="2'-fluoro-nucleotide"
  modified_base 7..7: /mod_base="OTHER" /note="2'-OMe-nucleotide"
  modified_base 8..8: /mod_base="OTHER" /note="2'-fluoro-nucleotide"
  modified_base 9..9: /mod_base="OTHER" /note="2'-OMe-nucleotide"
  modified_base 10..10: /mod_base="OTHER" /note="2'-fluoro-nucleotide"
  modified_base 11..11: /mod_base="OTHER" /note="2'-OMe-nucleotide"
  modified_base 12..12: /mod_base="OTHER" /note="2'-fluoro-nucleotide"
  modified_base 13..13: /mod_base="OTHER" /note="2'-OMe-nucleotide"
  modified_base 14..14: /mod_base="OTHER" /note="2'-fluoro-nucleotide"
  modified_base 15..15: /mod_base="OTHER" /note="2'-OMe-nucleotide"
  modified_base 16..16: /mod_base="OTHER" /note="2'-fluoro-nucleotide"
  modified_base 17..17: /mod_base="OTHER" /note="2'-OMe-nucleotide"
  modified_base 18..18: /mod_base="OTHER" /note="2'-fluoro-nucleotide"
  modified_base 19..19: /mod_base="OTHER" /note="2'-OMe-nucleotide"
  modified_base 20..20: /mod_base="OTHER" /note="dT"
  modified_base 21..21: /mod_base="OTHER" /note="dT"
uuagucugugguccugaaatt

SEQ ID NO: 789 - DNA, 21 bp, Artificial Sequence
  Description of Artificial Sequence: Synthetic oligonucleotide
  Description of Combined DNA/RNA Molecule: Synthetic oligonucleotide
  N-term hydroxyl group
  C-term hydroxyl group
  modified_base 1..1: /mod_base="OTHER" /note="2'-fluoro-nucleotide"
  modified_base 2..2: /mod_base="OTHER" /note="2'-fluoro-nucleotide"
  modified_base 3..3: /mod_base="OTHER" /note="2'-OMe-nucleotide"
  modified_base 4..4: /mod_base="OTHER" /note="2'-fluoro-nucleotide"
  modified_base 5..5: /mod_base="OTHER" /note="2'-OMe-nucleotide"
  modified_base 6..6: /mod_base="OTHER" /note="2'-fluoro-nucleotide"
  modified_base 7..7: /mod_base="OTHER" /note="2'-OMe-nucleotide"
  modified_base 8..8: /mod_base="OTHER" /note="2'-fluoro-nucleotide"
  modified_base 9..9: /mod_base="OTHER" /note="2'-OMe-nucleotide"
  modified_base 10..10: /mod_base="OTHER" /note="2'-fluoro-nucleotide"
  modified_base 11..11: /mod_base="OTHER" /note="2'-OMe-nucleotide"
  modified_base 12..12: /mod_base="OTHER" /note="2'-fluoro-nucleotide"
  modified_base 13..13: /mod_base="OTHER" /note="2'-OMe-nucleotide"
  modified_base 14..14: /mod_base="OTHER" /note="2'-fluoro-nucleotide"
  modified_base 15..15: /mod_base="OTHER" /note="2'-OMe-nucleotide"
  modified_base 16..16: /mod_base="OTHER" /note="2'-fluoro-nucleotide"
  modified_base 17..17: /mod_base="OTHER" /note="2'-OMe-nucleotide"
  modified_base 18..18: /mod_base="OTHER" /note="2'-fluoro-nucleotide"
  modified_base 19..19: /mod_base="OTHER" /note="2'-OMe-nucleotide"
  modified_base 20..20: /mod_base="OTHER" /note="dT"
  modified_base 21..21: /mod_base="OTHER" /note="dT"
cuuagucugugguccugaatt

SEQ ID NO: 790 - DNA, 21 bp, Artificial Sequence
  Description of Artificial Sequence: Synthetic oligonucleotide
  Description of Combined DNA/RNA Molecule: Synthetic oligonucleotide
  N-term hydroxyl group
  C-term hydroxyl group
  modified_base 1..1: /mod_base="OTHER" /note="2'-fluoro-nucleotide"
  modified_base 2..2: /mod_base="OTHER" /note="2'-fluoro-nucleotide"
  modified_base 3..3: /mod_base="OTHER" /note="2'-OMe-nucleotide"
  modified_base 4..4: /mod_base="OTHER" /note="2'-fluoro-nucleotide"
  modified_base 5..5: /mod_base="OTHER" /note="2'-OMe-nucleotide"
  modified_base 6..6: /mod_base="OTHER" /note="2'-fluoro-nucleotide"
  modified_base 7..7: /mod_base="OTHER" /note="2'-OMe-nucleotide"
  modified_base 8..8: /mod_base="OTHER" /note="2'-fluoro-nucleotide"
  modified_base 9..9: /mod_base="OTHER" /note="2'-OMe-nucleotide"
  modified_base 10..10: /mod_base="OTHER" /note="2'-fluoro-nucleotide"
  modified_base 11..11: /mod_base="OTHER" /note="2'-OMe-nucleotide"
  modified_base 12..12: /mod_base="OTHER" /note="2'-fluoro-nucleotide"
  modified_base 13..13: /mod_base="OTHER" /note="2'-OMe-nucleotide"
  modified_base 14..14: /mod_base="OTHER" /note="2'-fluoro-nucleotide"
  modified_base 15..15: /mod_base="OTHER" /note="2'-OMe-nucleotide"
  modified_base 16..16: /mod_base="OTHER" /note="2'-fluoro-nucleotide"
  modified_base 17..17: /mod_base="OTHER" /note="2'-OMe-nucleotide"
  modified_base 18..18: /mod_base="OTHER" /note="2'-fluoro-nucleotide"
  modified_base 19..19: /mod_base="OTHER" /note="2'-OMe-nucleotide"
  modified_base 20..20: /mod_base="OTHER" /note="dT"
  modified_base 21..21: /mod_base="OTHER" /note="dT"
gcuuagucugugguccugatt

SEQ ID NO: 791 - DNA, 21 bp, Artificial Sequence
  Description of Artificial Sequence: Synthetic oligonucleotide
  Description of Combined DNA/RNA Molecule: Synthetic oligonucleotide
  N-term hydroxyl group
  C-term hydroxyl group
  modified_base 1..1: /mod_base="OTHER" /note="2'-fluoro-nucleotide"
  modified_base 2..2: /mod_base="OTHER" /note="2'-fluoro-nucleotide"
  modified_base 3..3: /mod_base="OTHER" /note="2'-OMe-nucleotide"
  modified_base 4..4: /mod_base="OTHER" /note="2'-fluoro-nucleotide"
  modified_base 5..5: /mod_base="OTHER" /note="2'-OMe-nucleotide"
  modified_base 6..6: /mod_base="OTHER" /note="2'-fluoro-nucleotide"
  modified_base 7..7: /mod_base="OTHER" /note="2'-OMe-nucleotide"
  modified_base 8..8: /mod_base="OTHER" /note="2'-fluoro-nucleotide"
  modified_base 9..9: /mod_base="OTHER" /note="2'-OMe-nucleotide"
  modified_base 10..10: /mod_base="OTHER" /note="2'-fluoro-nucleotide"
  modified_base 11..11: /mod_base="OTHER" /note="2'-OMe-nucleotide"
  modified_base 12..12: /mod_base="OTHER" /note="2'-fluoro-nucleotide"
  modified_base 13..13: /mod_base="OTHER" /note="2'-OMe-nucleotide"
  modified_base 14..14: /mod_base="OTHER" /note="2'-fluoro-nucleotide"
  modified_base 15..15: /mod_base="OTHER" /note="2'-OMe-nucleotide"
  modified_base 16..16: /mod_base="OTHER" /note="2'-fluoro-nucleotide"
  modified_base 17..17: /mod_base="OTHER" /note="2'-OMe-nucleotide"
  modified_base 18..18: /mod_base="OTHER" /note="2'-fluoro-nucleotide"
  modified_base 19..19: /mod_base="OTHER" /note="2'-OMe-nucleotide"
  modified_base 20..20: /mod_base="OTHER" /note="dT"
  modified_base 21..21: /mod_base="OTHER" /note="dT"
cagcuuagucugugguccutt

SEQ ID NO: 792 - DNA, 21 bp, Artificial Sequence
  Description of Artificial Sequence: Synthetic oligonucleotide
  Description of Combined DNA/RNA Molecule: Synthetic oligonucleotide
  N-term hydroxyl group
  C-term hydroxyl group
  modified_base 1..1: /mod_base="OTHER" /note="2'-fluoro-nucleotide"
  modified_base 2..2: /mod_base="OTHER" /note="2'-fluoro-nucleotide"
  modified_base 3..3: /mod_base="OTHER" /note="2'-OMe-nucleotide"
  modified_base 4..4: /mod_base="OTHER" /note="2'-fluoro-nucleotide"
  modified_base 5..5: /mod_base="OTHER" /note="2'-OMe-nucleotide"
  modified_base 6..6: /mod_base="OTHER" /note="2'-fluoro-nucleotide"
  modified_base 7..7: /mod_base="OTHER" /note="2'-OMe-nucleotide"
  modified_base 8..8: /mod_base="OTHER" /note="2'-fluoro-nucleotide"
  modified_base 9..9: /mod_base="OTHER" /note="2'-OMe-nucleotide"
  modified_base 10..10: /mod_base="OTHER" /note="2'-fluoro-nucleotide"
  modified_base 11..11: /mod_base="OTHER" /note="2'-OMe-nucleotide"
  modified_base 12..12: /mod_base="OTHER" /note="2'-fluoro-nucleotide"
  modified_base 13..13: /mod_base="OTHER" /note="2'-OMe-nucleotide"
  modified_base 14..14: /mod_base="OTHER" /note="2'-fluoro-nucleotide"
  modified_base 15..15: /mod_base="OTHER" /note="2'-OMe-nucleotide"
  modified_base 16..16: /mod_base="OTHER" /note="2'-fluoro-nucleotide"
  modified_base 17..17: /mod_base="OTHER" /note="2'-OMe-nucleotide"
  modified_base 18..18: /mod_base="OTHER" /note="2'-fluoro-nucleotide"
  modified_base 19..19: /mod_base="OTHER" /note="2'-OMe-nucleotide"
  modified_base 20..20: /mod_base="OTHER" /note="dT"
  modified_base 21..21: /mod_base="OTHER" /note="dT"
acagcuuagucuguggucctt

SEQ ID NO: 793 - DNA, 21 bp, Artificial Sequence
  Description of Artificial Sequence: Synthetic oligonucleotide
  Description of Combined DNA/RNA Molecule: Synthetic oligonucleotide
  N-term hydroxyl group
  C-term hydroxyl group
  modified_base 1..1: /mod_base="OTHER" /note="2'-fluoro-nucleotide"
  modified_base 2..2: /mod_base="OTHER" /note="2'-fluoro-nucleotide"
  modified_base 3..3: /mod_base="OTHER" /note="2'-OMe-nucleotide"
  modified_base 4..4: /mod_base="OTHER" /note="2'-fluoro-nucleotide"
  modified_base 5..5: /mod_base="OTHER" /note="2'-OMe-nucleotide"
  modified_base 6..6: /mod_base="OTHER" /note="2'-fluoro-nucleotide"
  modified_base 7..7: /mod_base="OTHER" /note="2'-OMe-nucleotide"
  modified_base 8..8: /mod_base="OTHER" /note="2'-fluoro-nucleotide"
  modified_base 9..9: /mod_base="OTHER" /note="2'-OMe-nucleotide"
  modified_base 10..10: /mod_base="OTHER" /note="2'-fluoro-nucleotide"
  modified_base 11..11: /mod_base="OTHER" /note="2'-OMe-nucleotide"
  modified_base 12..12: /mod_base="OTHER" /note="2'-fluoro-nucleotide"
  modified_base 13..13: /mod_base="OTHER" /note="2'-OMe-nucleotide"
  modified_base 14..14: /mod_base="OTHER" /note="2'-fluoro-nucleotide"
  modified_base 15..15: /mod_base="OTHER" /note="2'-OMe-nucleotide"
  modified_base 16..16: /mod_base="OTHER" /note="2'-fluoro-nucleotide"
  modified_base 17..17: /mod_base="OTHER" /note="2'-OMe-nucleotide"
  modified_base 18..18: /mod_base="OTHER" /note="2'-fluoro-nucleotide"
  modified_base 19..19: /mod_base="OTHER" /note="2'-OMe-nucleotide"
  modified_base 20..20: /mod_base="OTHER" /note="dT"
  modified_base 21..21: /mod_base="OTHER" /note="dT"
gacagcuuagucugugguctt

SEQ ID NO: 794 - DNA, 21 bp, Artificial Sequence
  Description of Artificial Sequence: Synthetic oligonucleotide
  Description of Combined DNA/RNA Molecule: Synthetic oligonucleotide
  N-term hydroxyl group
  C-term hydroxyl group
  modified_base 1..1: /mod_base="OTHER" /note="2'-fluoro-nucleotide"
  modified_base 2..2: /mod_base="OTHER" /note="2'-fluoro-nucleotide"
  modified_base 3..3: /mod_base="OTHER" /note="2'-OMe-nucleotide"
  modified_base 4..4: /mod_base="OTHER" /note="2'-fluoro-nucleotide"
  modified_base 5..5: /mod_base="OTHER" /note="2'-OMe-nucleotide"
  modified_base 6..6: /mod_base="OTHER" /note="2'-fluoro-nucleotide"
  modified_base 7..7: /mod_base="OTHER" /note="2'-OMe-nucleotide"
  modified_base 8..8: /mod_base="OTHER" /note="2'-fluoro-nucleotide"
  modified_base 9..9: /mod_base="OTHER" /note="2'-OMe-nucleotide"
  modified_base 10..10: /mod_base="OTHER" /note="2'-fluoro-nucleotide"
  modified_base 11..11: /mod_base="OTHER" /note="2'-OMe-nucleotide"
  modified_base 12..12: /mod_base="OTHER" /note="2'-fluoro-nucleotide"
  modified_base 13..13: /mod_base="OTHER" /note="2'-OMe-nucleotide"
  modified_base 14..14: /mod_base="OTHER" /note="2'-fluoro-nucleotide"
  modified_base 15..15: /mod_base="OTHER" /note="2'-OMe-nucleotide"
  modified_base 16..16: /mod_base="OTHER" /note="2'-fluoro-nucleotide"
  modified_base 17..17: /mod_base="OTHER" /note="2'-OMe-nucleotide"
  modified_base 18..18: /mod_base="OTHER" /note="2'-fluoro-nucleotide"
  modified_base 19..19: /mod_base="OTHER" /note="2'-OMe-nucleotide"
  modified_base 20..20: /mod_base="OTHER" /note="dT"
  modified_base 21..21: /mod_base="OTHER" /note="dT"
guauucuggcccuaaaaaatt

SEQ ID NO: 795 - DNA, 21 bp, Artificial Sequence
  Description of Artificial Sequence: Synthetic oligonucleotide
  Description of Combined DNA/RNA Molecule: Synthetic oligonucleotide
  N-term hydroxyl group
  C-term hydroxyl group
  modified_base 1..1: /mod_base="OTHER" /note="2'-fluoro-nucleotide"
  modified_base 2..2: /mod_base="OTHER" /note="2'-fluoro-nucleotide"
  modified_base 3..3: /mod_base="OTHER" /note="2'-OMe-nucleotide"
  modified_base 4..4: /mod_base="OTHER" /note="2'-fluoro-nucleotide"
  modified_base 5..5: /mod_base="OTHER" /note="2'-OMe-nucleotide"
  modified_base 6..6: /mod_base="OTHER" /note="2'-fluoro-nucleotide"
  modified_base 7..7: /mod_base="OTHER" /note="2'-OMe-nucleotide"
  modified_base 8..8: /mod_base="OTHER" /note="2'-fluoro-nucleotide"
  modified_base 9..9: /mod_base="OTHER" /note="2'-OMe-nucleotide"
  modified_base 10..10: /mod_base="OTHER" /note="2'-fluoro-nucleotide"
  modified_base 11..11: /mod_base="OTHER" /note="2'-OMe-nucleotide"
  modified_base 12..12: /mod_base="OTHER" /note="2'-fluoro-nucleotide"
  modified_base 13..13: /mod_base="OTHER" /note="2'-OMe-nucleotide"
  modified_base 14..14: /mod_base="OTHER" /note="2'-fluoro-nucleotide"
  modified_base 15..15: /mod_base="OTHER" /note="2'-OMe-nucleotide"
  modified_base 16..16: /mod_base="OTHER" /note="2'-fluoro-nucleotide"
  modified_base 17..17: /mod_base="OTHER" /note="2'-OMe-nucleotide"
  modified_base 18..18: /mod_base="OTHER" /note="2'-fluoro-nucleotide"
  modified_base 19..19: /mod_base="OTHER" /note="2'-OMe-nucleotide"
  modified_base 20..20: /mod_base="OTHER" /note="dT"
  modified_base 21..21: /mod_base="OTHER" /note="dT"
gguauucuggcccuaaaaatt

SEQ ID NO: 796 - DNA, 21 bp, Artificial Sequence
  Description of Artificial Sequence: Synthetic oligonucleotide
  Description of Combined DNA/RNA Molecule: Synthetic oligonucleotide
  N-term hydroxyl group
  C-term hydroxyl group
  modified_base 1..1: /mod_base="OTHER" /note="2'-fluoro-nucleotide"
  modified_base 2..2: /mod_base="OTHER" /note="2'-fluoro-nucleotide"
  modified_base 3..3: /mod_base="OTHER" /note="2'-OMe-nucleotide"
  modified_base 4..4: /mod_base="OTHER" /note="2'-fluoro-nucleotide"
  modified_base 5..5: /mod_base="OTHER" /note="2'-OMe-nucleotide"
  modified_base 6..6: /mod_base="OTHER" /note="2'-fluoro-nucleotide"
  modified_base 7..7: /mod_base="OTHER" /note="2'-OMe-nucleotide"
  modified_base 8..8: /mod_base="OTHER" /note="2'-fluoro-nucleotide"
  modified_base 9..9: /mod_base="OTHER" /note="2'-OMe-nucleotide"
  modified_base 10..10: /mod_base="OTHER" /note="2'-fluoro-nucleotide"
  modified_base 11..11: /mod_base="OTHER" /note="2'-OMe-nucleotide"
  modified_base 12..12: /mod_base="OTHER" /note="2'-fluoro-nucleotide"
  modified_base 13..13: /mod_base="OTHER" /note="2'-OMe-nucleotide"
  modified_base 14..14: /mod_base="OTHER" /note="2'-fluoro-nucleotide"
  modified_base 15..15: /mod_base="OTHER" /note="2'-OMe-nucleotide"
  modified_base 16..16: /mod_base="OTHER" /note="2'-fluoro-nucleotide"
  modified_base 17..17: /mod_base="OTHER" /note="2'-OMe-nucleotide"
  modified_base 18..18: /mod_base="OTHER" /note="2'-fluoro-nucleotide"
  modified_base 19..19: /mod_base="OTHER" /note="2'-OMe-nucleotide"
  modified_base 20..20: /mod_base="OTHER" /note="dT"
  modified_base 21..21: /mod_base="OTHER" /note="dT"
ugguauucuggcccuaaaatt

SEQ ID NO: 797 - DNA, 21 bp, Artificial Sequence
  Description of Artificial Sequence: Synthetic oligonucleotide
  Description of Combined DNA/RNA Molecule: Synthetic oligonucleotide
  N-term hydroxyl group
  C-term hydroxyl group
  modified_base 1..1: /mod_base="OTHER" /note="2'-fluoro-nucleotide"
  modified_base 2..2: /mod_base="OTHER" /note="2'-fluoro-nucleotide"
  modified_base 3..3: /mod_base="OTHER" /note="2'-OMe-nucleotide"
  modified_base 4..4: /mod_base="OTHER" /note="2'-fluoro-nucleotide"
  modified_base 5..5: /mod_base="OTHER" /note="2'-OMe-nucleotide"
  modified_base 6..6: /mod_base="OTHER" /note="2'-fluoro-nucleotide"
  modified_base 7..7: /mod_base="OTHER" /note="2'-OMe-nucleotide"
  modified_base 8..8: /mod_base="OTHER" /note="2'-fluoro-nucleotide"
  modified_base 9..9: /mod_base="OTHER" /note="2'-OMe-nucleotide"
  modified_base 10..10: /mod_base="OTHER" /note="2'-fluoro-nucleotide"
  modified_base 11..11: /mod_base="OTHER" /note="2'-OMe-nucleotide"
  modified_base 12..12: /mod_base="OTHER" /note="2'-fluoro-nucleotide"
  modified_base 13..13: /mod_base="OTHER" /note="2'-OMe-nucleotide"
  modified_base 14..14: /mod_base="OTHER" /note="2'-fluoro-nucleotide"
  modified_base 15..15: /mod_base="OTHER" /note="2'-OMe-nucleotide"
  modified_base 16..16: /mod_base="OTHER" /note="2'-fluoro-nucleotide"
  modified_base 17..17: /mod_base="OTHER" /note="2'-OMe-nucleotide"
  modified_base 18..18: /mod_base="OTHER" /note="2'-fluoro-nucleotide"
  modified_base 19..19: /mod_base="OTHER" /note="2'-OMe-nucleotide"
  modified_base 20..20: /mod_base="OTHER" /note="dT"
  modified_base 21..21: /mod_base="OTHER" /note="dT"
uugguauucuggcccuaaatt

SEQ ID NO: 798 - DNA, 21 bp, Artificial Sequence
  Description of Artificial Sequence: Synthetic oligonucleotide
  Description of Combined DNA/RNA Molecule: Synthetic oligonucleotide
  N-term hydroxyl group
  C-term hydroxyl group
  modified_base 1..1: /mod_base="OTHER" /note="2'-fluoro-nucleotide"
  modified_base 2..2: /mod_base="OTHER" /note="2'-fluoro-nucleotide"
  modified_base 3..3: /mod_base="OTHER" /note="2'-OMe-nucleotide"
  modified_base 4..4: /mod_base="OTHER" /note="2'-fluoro-nucleotide"
  modified_base 5..5: /mod_base="OTHER" /note="2'-OMe-nucleotide"
  modified_base 6..6: /mod_base="OTHER" /note="2'-fluoro-nucleotide"
  modified_base 7..7: /mod_base="OTHER" /note="2'-OMe-nucleotide"
  modified_base 8..8: /mod_base="OTHER" /note="2'-fluoro-nucleotide"
  modified_base 9..9: /mod_base="OTHER" /note="2'-OMe-nucleotide"
  modified_base 10..10: /mod_base="OTHER" /note="2'-fluoro-nucleotide"
  modified_base 11..11: /mod_base="OTHER" /note="2'-OMe-nucleotide"
  modified_base 12..12: /mod_base="OTHER" /note="2'-fluoro-nucleotide"
  modified_base 13..13: /mod_base="OTHER" /note="2'-OMe-nucleotide"
  modified_base 14..14: /mod_base="OTHER" /note="2'-fluoro-nucleotide"
  modified_base 15..15: /mod_base="OTHER" /note="2'-OMe-nucleotide"
  modified_base 16..16: /mod_base="OTHER" /note="2'-fluoro-nucleotide"
  modified_base 17..17: /mod_base="OTHER" /note="2'-OMe-nucleotide"
  modified_base 18..18: /mod_base="OTHER" /note="2'-fluoro-nucleotide"
  modified_base 19..19: /mod_base="OTHER" /note="2'-OMe-nucleotide"
  modified_base 20..20: /mod_base="OTHER" /note="dT"
  modified_base 21..21: /mod_base="OTHER" /note="dT"
uuugguauucuggcccuaatt

SEQ ID NO: 799 - DNA, 21 bp, Artificial Sequence
  Description of Artificial Sequence: Synthetic oligonucleotide
  Description of Combined DNA/RNA Molecule: Synthetic oligonucleotide
  N-term hydroxyl group
  C-term hydroxyl group
  modified_base 1..1: /mod_base="OTHER" /note="2'-fluoro-nucleotide"
  modified_base 2..2: /mod_base="OTHER" /note="2'-fluoro-nucleotide"
  modified_base 3..3: /mod_base="OTHER" /note="2'-OMe-nucleotide"
  modified_base 4..4: /mod_base="OTHER" /note="2'-fluoro-nucleotide"
  modified_base 5..5: /mod_base="OTHER" /note="2'-OMe-nucleotide"
  modified_base 6..6: /mod_base="OTHER" /note="2'-fluoro-nucleotide"
  modified_base 7..7: /mod_base="OTHER" /note="2'-OMe-nucleotide"
  modified_base 8..8: /mod_base="OTHER" /note="2'-fluoro-nucleotide"
  modified_base 9..9: /mod_base="OTHER" /note="2'-OMe-nucleotide"
  modified_base 10..10: /mod_base="OTHER" /note="2'-fluoro-nucleotide"
  modified_base 11..11: /mod_base="OTHER" /note="2'-OMe-nucleotide"
  modified_base 12..12: /mod_base="OTHER" /note="2'-fluoro-nucleotide"
  modified_base 13..13: /mod_base="OTHER" /note="2'-OMe-nucleotide"
  modified_base 14..14: /mod_base="OTHER" /note="2'-fluoro-nucleotide"
  modified_base 15..15: /mod_base="OTHER" /note="2'-OMe-nucleotide"
  modified_base 16..16: /mod_base="OTHER" /note="2'-fluoro-nucleotide"
  modified_base 17..17: /mod_base="OTHER" /note="2'-OMe-nucleotide"
  modified_base 18..18: /mod_base="OTHER" /note="2'-fluoro-nucleotide"
  modified_base 19..19: /mod_base="OTHER" /note="2'-OMe-nucleotide"
  modified_base 20..20: /mod_base="OTHER" /note="dT"
  modified_base 21..21: /mod_base="OTHER" /note="dT"
uuuugguauucuggcccuatt

SEQ ID NO: 800 - DNA, 21 bp, Artificial Sequence
  Description of Artificial Sequence: Synthetic oligonucleotide
  Description of Combined DNA/RNA Molecule: Synthetic oligonucleotide
  N-term hydroxyl group
  C-term hydroxyl group
  modified_base 1..1: /mod_base="OTHER" /note="2'-fluoro-nucleotide"
  modified_base 2..2: /mod_base="OTHER" /note="2'-fluoro-nucleotide"
  modified_base 3..3: /mod_base="OTHER" /note="2'-OMe-nucleotide"
  modified_base 4..4: /mod_base="OTHER" /note="2'-fluoro-nucleotide"
  modified_base 5..5: /mod_base="OTHER" /note="2'-OMe-nucleotide"
  modified_base 6..6: /mod_base="OTHER" /note="2'-fluoro-nucleotide"
  modified_base 7..7: /mod_base="OTHER" /note="2'-OMe-nucleotide"
  modified_base 8..8: /mod_base="OTHER" /note="2'-fluoro-nucleotide"
  modified_base 9..9: /mod_base="OTHER" /note="2'-OMe-nucleotide"
  modified_base 10..10: /mod_base="OTHER" /note="2'-fluoro-nucleotide"
  modified_base 11..11: /mod_base="OTHER" /note="2'-OMe-nucleotide"
  modified_base 12..12: /mod_base="OTHER" /note="2'-fluoro-nucleotide"
  modified_base 13..13: /mod_base="OTHER" /note="2'-OMe-nucleotide"
  modified_base 14..14: /mod_base="OTHER" /note="2'-fluoro-nucleotide"
  modified_base 15..15: /mod_base="OTHER" /note="2'-OMe-nucleotide"
  modified_base 16..16: /mod_base="OTHER" /note="2'-fluoro-nucleotide"
  modified_base 17..17: /mod_base="OTHER" /note="2'-OMe-nucleotide"
  modified_base 18..18: /mod_base="OTHER" /note="2'-fluoro-nucleotide"
  modified_base 19..19: /mod_base="OTHER" /note="2'-OMe-nucleotide"
  modified_base 20..20: /mod_base="OTHER" /note="dT"
  modified_base 21..21: /mod_base="OTHER" /note="dT"
auuuugguauucuggcccutt

SEQ ID NO: 801 - DNA, 21 bp, Artificial Sequence
  Description of Artificial Sequence: Synthetic oligonucleotide
  Description of Combined DNA/RNA Molecule: Synthetic oligonucleotide
  N-term hydroxyl group
  C-term hydroxyl group
  modified_base 1..1: /mod_base="OTHER" /note="2'-fluoro-nucleotide"
  modified_base 2..2: /mod_base="OTHER" /note="2'-fluoro-nucleotide"
  modified_base 3..3: /mod_base="OTHER" /note="2'-OMe-nucleotide"
  modified_base 4..4: /mod_base="OTHER" /note="2'-fluoro-nucleotide"
  modified_base 5..5: /mod_base="OTHER" /note="2'-OMe-nucleotide"
  modified_base 6..6: /mod_base="OTHER" /note="2'-fluoro-nucleotide"
  modified_base 7..7: /mod_base="OTHER" /note="2'-OMe-nucleotide"
  modified_base 8..8: /mod_base="OTHER" /note="2'-fluoro-nucleotide"
  modified_base 9..9: /mod_base="OTHER" /note="2'-OMe-nucleotide"
  modified_base 10..10: /mod_base="OTHER" /note="2'-fluoro-nucleotide"
  modified_base 11..11: /mod_base="OTHER" /note="2'-OMe-nucleotide"
  modified_base 12..12: /mod_base="OTHER" /note="2'-fluoro-nucleotide"
  modified_base 13..13: /mod_base="OTHER" /note="2'-OMe-nucleotide"
  modified_base 14..14: /mod_base="OTHER" /note="2'-fluoro-nucleotide"
  modified_base 15..15: /mod_base="OTHER" /note="2'-OMe-nucleotide"
  modified_base 16..16: /mod_base="OTHER" /note="2'-fluoro-nucleotide"
  modified_base 17..17: /mod_base="OTHER" /note="2'-OMe-nucleotide"
  modified_base 18..18: /mod_base="OTHER" /note="2'-fluoro-nucleotide"
  modified_base 19..19: /mod_base="OTHER" /note="2'-OMe-nucleotide"
  modified_base 20..20: /mod_base="OTHER" /note="dT"
  modified_base 21..21: /mod_base="OTHER" /note="dT"
auuugaaauuguccaauuutt

SEQ ID NO: 802 - DNA, 21 bp, Artificial Sequence
  Description of Artificial Sequence: Synthetic oligonucleotide
  Description of Combined DNA/RNA Molecule: Synthetic oligonucleotide
  N-term hydroxyl group
  C-term hydroxyl group
  modified_base 1..1: /mod_base="OTHER" /note="2'-fluoro-nucleotide"
  modified_base 2..2: /mod_base="OTHER" /note="2'-fluoro-nucleotide"
  modified_base 3..3: /mod_base="OTHER" /note="2'-OMe-nucleotide"
  modified_base 4..4: /mod_base="OTHER" /note="2'-fluoro-nucleotide"
  modified_base 5..5: /mod_base="OTHER" /note="2'-OMe-nucleotide"
  modified_base 6..6: /mod_base="OTHER" /note="2'-fluoro-nucleotide"
  modified_base 7..7: /mod_base="OTHER" /note="2'-OMe-nucleotide"
  modified_base 8..8: /mod_base="OTHER" /note="2'-fluoro-nucleotide"
  modified_base 9..9: /mod_base="OTHER" /note="2'-OMe-nucleotide"
  modified_base 10..10: /mod_base="OTHER" /note="2'-fluoro-nucleotide"
  modified_base 11..11: /mod_base="OTHER" /note="2'-OMe-nucleotide"
  modified_base 12..12: /mod_base="OTHER" /note="2'-fluoro-nucleotide"
  modified_base 13..13: /mod_base="OTHER" /note="2'-OMe-nucleotide"
  modified_base 14..14: /mod_base="OTHER" /note="2'-fluoro-nucleotide"
  modified_base 15..15: /mod_base="OTHER" /note="2'-OMe-nucleotide"
  modified_base 16..16: /mod_base="OTHER" /note="2'-fluoro-nucleotide"
  modified_base 17..17: /mod_base="OTHER" /note="2'-OMe-nucleotide"
  modified_base 18..18: /mod_base="OTHER" /note="2'-fluoro-nucleotide"
  modified_base 19..19: /mod_base="OTHER" /note="2'-OMe-nucleotide"
  modified_base 20..20: /mod_base="OTHER" /note="dT"
  modified_base 21..21: /mod_base="OTHER" /note="dT"
gcauuugaaauuguccaautt

SEQ ID NO: 803 - DNA, 21 bp, Artificial Sequence
  Description of Artificial Sequence: Synthetic oligonucleotide
  Description of Combined DNA/RNA Molecule: Synthetic oligonucleotide
  N-term hydroxyl group
  C-term hydroxyl group
  modified_base 1..1: /mod_base="OTHER" /note="2'-fluoro-nucleotide"
  modified_base 2..2: /mod_base="OTHER" /note="2'-fluoro-nucleotide"
  modified_base 3..3: /mod_base="OTHER" /note="2'-OMe-nucleotide"
  modified_base 4..4: /mod_base="OTHER" /note="2'-fluoro-nucleotide"
  modified_base 5..5: /mod_base="OTHER" /note="2'-OMe-nucleotide"
  modified_base 6..6: /mod_base="OTHER" /note="2'-fluoro-nucleotide"
  modified_base 7..7: /mod_base="OTHER" /note="2'-OMe-nucleotide"
  modified_base 8..8: /mod_base="OTHER" /note="2'-fluoro-nucleotide"
  modified_base 9..9: /mod_base="OTHER" /note="2'-OMe-nucleotide"
  modified_base 10..10: /mod_base="OTHER" /note="2'-fluoro-nucleotide"
  modified_base 11..11: /mod_base="OTHER" /note="2'-OMe-nucleotide"
  modified_base 12..12: /mod_base="OTHER" /note="2'-fluoro-nucleotide"
  modified_base 13..13: /mod_base="OTHER" /note="2'-OMe-nucleotide"
  modified_base 14..14: /mod_base="OTHER" /note="2'-fluoro-nucleotide"
  modified_base 15..15: /mod_base="OTHER" /note="2'-OMe-nucleotide"
  modified_base 16..16: /mod_base="OTHER" /note="2'-fluoro-nucleotide"
  modified_base 17..17: /mod_base="OTHER" /note="2'-OMe-nucleotide"
  modified_base 18..18: /mod_base="OTHER" /note="2'-fluoro-nucleotide"
  modified_base 19..19: /mod_base="OTHER" /note="2'-OMe-nucleotide"
  modified_base 20..20: /mod_base="OTHER" /note="dT"
  modified_base 21..21: /mod_base="OTHER" /note="dT"
ugcauuugaaauuguccaatt

SEQ ID NO: 804 - DNA, 21 bp, Artificial Sequence
  Description of Artificial Sequence: Synthetic oligonucleotide
  Description of Combined DNA/RNA Molecule: Synthetic oligonucleotide
  N-term hydroxyl group
  C-term hydroxyl group
  modified_base 1..1: /mod_base="OTHER" /note="2'-fluoro-nucleotide"
  modified_base 2..2: /mod_base="OTHER" /note="2'-fluoro-nucleotide"
  modified_base 3..3: /mod_base="OTHER" /note="2'-OMe-nucleotide"
  modified_base 4..4: /mod_base="OTHER" /note="2'-fluoro-nucleotide"
  modified_base 5..5: /mod_base="OTHER" /note="2'-OMe-nucleotide"
  modified_base 6..6: /mod_base="OTHER" /note="2'-fluoro-nucleotide"
  modified_base 7..7: /mod_base="OTHER" /note="2'-OMe-nucleotide"
  modified_base 8..8: /mod_base="OTHER" /note="2'-fluoro-nucleotide"
  modified_base 9..9: /mod_base="OTHER" /note="2'-OMe-nucleotide"
  modified_base 10..10: /mod_base="OTHER" /note="2'-fluoro-nucleotide"
  modified_base 11..11: /mod_base="OTHER" /note="2'-OMe-nucleotide"
  modified_base 12..12: /mod_base="OTHER" /note="2'-fluoro-nucleotide"
  modified_base 13..13: /mod_base="OTHER" /note="2'-OMe-nucleotide"
  modified_base 14..14: /mod_base="OTHER" /note="2'-fluoro-nucleotide"
  modified_base 15..15: /mod_base="OTHER" /note="2'-OMe-nucleotide"
  modified_base 16..16: /mod_base="OTHER" /note="2'-fluoro-nucleotide"
  modified_base 17..17: /mod_base="OTHER" /note="2'-OMe-nucleotide"
  modified_base 18..18: /mod_base="OTHER" /note="2'-fluoro-nucleotide"
  modified_base 19..19: /mod_base="OTHER" /note="2'-OMe-nucleotide"
  modified_base 20..20: /mod_base="OTHER" /note="dT"
  modified_base 21..21: /mod_base="OTHER" /note="dT"
gaagcaacucauauauuaatt

SEQ ID NO: 805 - DNA, 21 bp, Artificial Sequence
  Description of Artificial Sequence: Synthetic oligonucleotide
  Description of Combined DNA/RNA Molecule: Synthetic oligonucleotide
  N-term hydroxyl group
  C-term hydroxyl group
  modified_base 1..1: /mod_base="OTHER" /note="2'-fluoro-nucleotide"
  modified_base 2..2: /mod_base="OTHER" /note="2'-fluoro-nucleotide"
  modified_base 3..3: /mod_base="OTHER" /note="2'-OMe-nucleotide"
  modified_base 4..4: /mod_base="OTHER" /note="2'-fluoro-nucleotide"
  modified_base 5..5: /mod_base="OTHER" /note="2'-OMe-nucleotide"
  modified_base 6..6: /mod_base="OTHER" /note="2'-fluoro-nucleotide"
  modified_base 7..7: /mod_base="OTHER" /note="2'-OMe-nucleotide"
  modified_base 8..8: /mod_base="OTHER" /note="2'-fluoro-nucleotide"
  modified_base 9..9: /mod_base="OTHER" /note="2'-OMe-nucleotide"
  modified_base 10..10: /mod_base="OTHER" /note="2'-fluoro-nucleotide"
  modified_base 11..11: /mod_base="OTHER" /note="2'-OMe-nucleotide"
  modified_base 12..12: /mod_base="OTHER" /note="2'-fluoro-nucleotide"
  modified_base 13..13: /mod_base="OTHER" /note="2'-OMe-nucleotide"
  modified_base 14..14: /mod_base="OTHER" /note="2'-fluoro-nucleotide"
  modified_base 15..15: /mod_base="OTHER" /note="2'-OMe-nucleotide"
  modified_base 16..16: /mod_base="OTHER" /note="2'-fluoro-nucleotide"
  modified_base 17..17: /mod_base="OTHER" /note="2'-OMe-nucleotide"
  modified_base 18..18: /mod_base="OTHER" /note="2'-fluoro-nucleotide"
  modified_base 19..19: /mod_base="OTHER" /note="2'-OMe-nucleotide"
  modified_base 20..20: /mod_base="OTHER" /note="dT"
  modified_base 21..21: /mod_base="OTHER" /note="dT"
gaauugucuugaucaauuctt

SEQ ID NO: 806 - DNA, 21 bp, Artificial Sequence
  Description of Artificial Sequence: Synthetic oligonucleotide
  Description of Combined DNA/RNA Molecule: Synthetic oligonucleotide
  N-term hydroxyl group
  C-term hydroxyl group
  modified_base 1..1: /mod_base="OTHER" /note="2'-fluoro-nucleotide"
  modified_base 2..2: /mod_base="OTHER" /note="2'-fluoro-nucleotide"
  modified_base 3..3: /mod_base="OTHER" /note="2'-OMe-nucleotide"
  modified_base 4..4: /mod_base="OTHER" /note="2'-fluoro-nucleotide"
  modified_base 5..5: /mod_base="OTHER" /note="2'-OMe-nucleotide"
  modified_base 6..6: /mod_base="OTHER" /note="2'-fluoro-nucleotide"
  modified_base 7..7: /mod_base="OTHER" /note="2'-OMe-nucleotide"
  modified_base 8..8: /mod_base="OTHER" /note="2'-fluoro-nucleotide"
  modified_base 9..9: /mod_base="OTHER" /note="2'-OMe-nucleotide"
  modified_base 10..10: /mod_base="OTHER" /note="2'-fluoro-nucleotide"
  modified_base 11..11: /mod_base="OTHER" /note="2'-OMe-nucleotide"
  modified_base 12..12: /mod_base="OTHER" /note="2'-fluoro-nucleotide"
  modified_base 13..13: /mod_base="OTHER" /note="2'-OMe-nucleotide"
  modified_base 14..14: /mod_base="OTHER" /note="2'-fluoro-nucleotide"
  modified_base 15..15: /mod_base="OTHER" /note="2'-OMe-nucleotide"
  modified_base 16..16: /mod_base="OTHER" /note="2'-fluoro-nucleotide"
  modified_base 17..17: /mod_base="OTHER" /note="2'-OMe-nucleotide"
  modified_base 18..18: /mod_base="OTHER" /note="2'-fluoro-nucleotide"
  modified_base 19..19: /mod_base="OTHER" /note="2'-OMe-nucleotide"
  modified_base 20..20: /mod_base="OTHER" /note="dT"
  modified_base 21..21: /mod_base="OTHER" /note="dT"
ugaauugucuugaucaauutt

SEQ ID NO: 807 - DNA, 21 bp, Artificial Sequence
  Description of Artificial Sequence: Synthetic oligonucleotide
  Description of Combined DNA/RNA Molecule: Synthetic oligonucleotide
  N-term hydroxyl group
  C-term hydroxyl group
  modified_base 1..1: /mod_base="OTHER" /note="2'-fluoro-nucleotide"
  modified_base 2..2: /mod_base="OTHER" /note="2'-fluoro-nucleotide"
  modified_base 3..3: /mod_base="OTHER" /note="2'-OMe-nucleotide"
  modified_base 4..4: /mod_base="OTHER" /note="2'-fluoro-nucleotide"
  modified_base 5..5: /mod_base="OTHER" /note="2'-OMe-nucleotide"
  modified_base 6..6: /mod_base="OTHER" /note="2'-fluoro-nucleotide"
  modified_base 7..7: /mod_base="OTHER" /note="2'-OMe-nucleotide"
  modified_base 8..8: /mod_base="OTHER" /note="2'-fluoro-nucleotide"
  modified_base 9..9: /mod_base="OTHER" /note="2'-OMe-nucleotide"
  modified_base 10..10: /mod_base="OTHER" /note="2'-fluoro-nucleotide"
  modified_base 11..11: /mod_base="OTHER" /note="2'-OMe-nucleotide"
  modified_base 12..12: /mod_base="OTHER" /note="2'-fluoro-nucleotide"
  modified_base 13..13: /mod_base="OTHER" /note="2'-OMe-nucleotide"
  modified_base 14..14: /mod_base="OTHER" /note="2'-fluoro-nucleotide"
  modified_base 15..15: /mod_base="OTHER" /note="2'-OMe-nucleotide"
  modified_base 16..16: /mod_base="OTHER" /note="2'-fluoro-nucleotide"
  modified_base 17..17: /mod_base="OTHER" /note="2'-OMe-nucleotide"
  modified_base 18..18: /mod_base="OTHER" /note="2'-fluoro-nucleotide"
  modified_base 19..19: /mod_base="OTHER" /note="2'-OMe-nucleotide"
  modified_base 20..20: /mod_base="OTHER" /note="dT"
  modified_base 21..21: /mod_base="OTHER" /note="dT"
augaauugucuugaucaautt

SEQ ID NO: 808 - DNA, 21 bp, Artificial Sequence
  Description of Artificial Sequence: Synthetic oligonucleotide
  Description of Combined DNA/RNA Molecule: Synthetic oligonucleotide
  N-term hydroxyl group
  C-term hydroxyl group
  modified_base 1..1: /mod_base="OTHER" /note="2'-fluoro-nucleotide"
  modified_base 2..2: /mod_base="OTHER" /note="2'-fluoro-nucleotide"
  modified_base 3..3: /mod_base="OTHER" /note="2'-OMe-nucleotide"
  modified_base 4..4: /mod_base="OTHER" /note="2'-fluoro-nucleotide"
  modified_base 5..5: /mod_base="OTHER" /note="2'-OMe-nucleotide"
  modified_base 6..6: /mod_base="OTHER" /note="2'-fluoro-nucleotide"
  modified_base 7..7: /mod_base="OTHER" /note="2'-OMe-nucleotide"
  modified_base 8..8: /mod_base="OTHER" /note="2'-fluoro-nucleotide"
  modified_base 9..9: /mod_base="OTHER" /note="2'-OMe-nucleotide"
  modified_base 10..10: /mod_base="OTHER" /note="2'-fluoro-nucleotide"
  modified_base 11..11: /mod_base="OTHER" /note="2'-OMe-nucleotide"
  modified_base 12..12: /mod_base="OTHER" /note="2'-fluoro-nucleotide"
  modified_base 13..13: /mod_base="OTHER" /note="2'-OMe-nucleotide"
  modified_base 14..14: /mod_base="OTHER" /note="2'-fluoro-nucleotide"
  modified_base 15..15: /mod_base="OTHER" /note="2'-OMe-nucleotide"
  modified_base 16..16: /mod_base="OTHER" /note="2'-fluoro-nucleotide"
  modified_base 17..17: /mod_base="OTHER" /note="2'-OMe-nucleotide"
  modified_base 18..18: /mod_base="OTHER" /note="2'-fluoro-nucleotide"
  modified_base 19..19: /mod_base="OTHER" /note="2'-OMe-nucleotide"
  modified_base 20..20: /mod_base="OTHER" /note="dT"
  modified_base 21..21: /mod_base="OTHER" /note="dT"
gaugaauugucuugaucaatt

SEQ ID NO: 809 - DNA, 21 bp, Artificial Sequence
  Description of Artificial Sequence: Synthetic oligonucleotide
  Description of Combined DNA/RNA Molecule: Synthetic oligonucleotide
  N-term hydroxyl group
  C-term hydroxyl group
  modified_base 1..1: /mod_base="OTHER" /note="2'-fluoro-nucleotide"
  modified_base 2..2: /mod_base="OTHER" /note="2'-fluoro-nucleotide"
  modified_base 3..3: /mod_base="OTHER" /note="2'-OMe-nucleotide"
  modified_base 4..4: /mod_base="OTHER" /note="2'-fluoro-nucleotide"
  modified_base 5..5: /mod_base="OTHER" /note="2'-OMe-nucleotide"
  modified_base 6..6: /mod_base="OTHER" /note="2'-fluoro-nucleotide"
  modified_base 7..7: /mod_base="OTHER" /note="2'-OMe-nucleotide"
  modified_base 8..8: /mod_base="OTHER" /note="2'-fluoro-nucleotide"
  modified_base 9..9: /mod_base="OTHER" /note="2'-OMe-nucleotide"
  modified_base 10..10: /mod_base="OTHER" /note="2'-fluoro-nucleotide"
  modified_base 11..11: /mod_base="OTHER" /note="2'-OMe-nucleotide"
  modified_base 12..12: /mod_base="OTHER" /note="2'-fluoro-nucleotide"
  modified_base 13..13: /mod_base="OTHER" /note="2'-OMe-nucleotide"
  modified_base 14..14: /mod_base="OTHER" /note="2'-fluoro-nucleotide"
  modified_base 15..15: /mod_base="OTHER" /note="2'-OMe-nucleotide"
  modified_base 16..16: /mod_base="OTHER" /note="2'-fluoro-nucleotide"
  modified_base 17..17: /mod_base="OTHER" /note="2'-OMe-nucleotide"
  modified_base 18..18: /mod_base="OTHER" /note="2'-fluoro-nucleotide"
  modified_base 19..19: /mod_base="OTHER" /note="2'-OMe-nucleotide"
  modified_base 20..20: /mod_base="OTHER" /note="dT"
  modified_base 21..21: /mod_base="OTHER" /note="dT"
ugaugaauugucuugaucatt

SEQ ID NO: 810 - DNA, 21 bp, Artificial Sequence
  Description of Artificial Sequence: Synthetic oligonucleotide
  Description of Combined DNA/RNA Molecule: Synthetic oligonucleotide
  N-term hydroxyl group
  C-term hydroxyl group
  modified_base 1..1: /mod_base="OTHER" /note="2'-fluoro-nucleotide"
  modified_base 2..2: /mod_base="OTHER" /note="2'-fluoro-nucleotide"
  modified_base 3..3: /mod_base="OTHER" /note="2'-OMe-nucleotide"
  modified_base 4..4: /mod_base="OTHER" /note="2'-fluoro-nucleotide"
  modified_base 5..5: /mod_base="OTHER" /note="2'-OMe-nucleotide"
  modified_base 6..6: /mod_base="OTHER" /note="2'-fluoro-nucleotide"
  modified_base 7..7: /mod_base="OTHER" /note="2'-OMe-nucleotide"
  modified_base 8..8: /mod_base="OTHER" /note="2'-fluoro-nucleotide"
  modified_base 9..9: /mod_base="OTHER" /note="2'-OMe-nucleotide"
  modified_base 10..10: /mod_base="OTHER" /note="2'-fluoro-nucleotide"
  modified_base 11..11: /mod_base="OTHER" /note="2'-OMe-nucleotide"
  modified_base 12..12: /mod_base="OTHER" /note="2'-fluoro-nucleotide"
  modified_base 13..13: /mod_base="OTHER" /note="2'-OMe-nucleotide"
  modified_base 14..14: /mod_base="OTHER" /note="2'-fluoro-nucleotide"
  modified_base 15..15: /mod_base="OTHER" /note="2'-OMe-nucleotide"
  modified_base 16..16: /mod_base="OTHER" /note="2'-fluoro-nucleotide"
  modified_base 17..17: /mod_base="OTHER" /note="2'-OMe-nucleotide"
  modified_base 18..18: /mod_base="OTHER" /note="2'-fluoro-nucleotide"
  modified_base 19..19: /mod_base="OTHER" /note="2'-OMe-nucleotide"
  modified_base 20..20: /mod_base="OTHER" /note="dT"
  modified_base 21..21: /mod_base="OTHER" /note="dT"
augaugaauugucuugauctt

SEQ ID NO: 811 - DNA, 21 bp, Artificial Sequence
  Description of Artificial Sequence: Synthetic oligonucleotide
  Description of Combined DNA/RNA Molecule: Synthetic oligonucleotide
  N-term hydroxyl group
  C-term hydroxyl group
  modified_base 1..1: /mod_base="OTHER" /note="2'-fluoro-nucleotide"
  modified_base 2..2: /mod_base="OTHER" /note="2'-fluoro-nucleotide"
  modified_base 3..3: /mod_base="OTHER" /note="2'-OMe-nucleotide"
  modified_base 4..4: /mod_base="OTHER" /note="2'-fluoro-nucleotide"
  modified_base 5..5: /mod_base="OTHER" /note="2'-OMe-nucleotide"
  modified_base 6..6: /mod_base="OTHER" /note="2'-fluoro-nucleotide"
  modified_base 7..7: /mod_base="OTHER" /note="2'-OMe-nucleotide"
  modified_base 8..8: /mod_base="OTHER" /note="2'-fluoro-nucleotide"
  modified_base 9..9: /mod_base="OTHER" /note="2'-OMe-nucleotide"
  modified_base 10..10: /mod_base="OTHER" /note="2'-fluoro-nucleotide"
  modified_base 11..11: /mod_base="OTHER" /note="2'-OMe-nucleotide"
  modified_base 12..12: /mod_base="OTHER" /note="2'-fluoro-nucleotide"
  modified_base 13..13: /mod_base="OTHER" /note="2'-OMe-nucleotide"
  modified_base 14..14: /mod_base="OTHER" /note="2'-fluoro-nucleotide"
  modified_base 15..15: /mod_base="OTHER" /note="2'-OMe-nucleotide"
  modified_base 16..16: /mod_base="OTHER" /note="2'-fluoro-nucleotide"
  modified_base 17..17: /mod_base="OTHER" /note="2'-OMe-nucleotide"
  modified_base 18..18: /mod_base="OTHER" /note="2'-fluoro-nucleotide"
  modified_base 19..19: /mod_base="OTHER" /note="2'-OMe-nucleotide"
  modified_base 20..20: /mod_base="OTHER" /note="dT"
  modified_base 21..21: /mod_base="OTHER" /note="dT"
aaugaugaauugucuugautt

SEQ ID NO: 812 - DNA, 21 bp, Artificial Sequence
  Description of Artificial Sequence: Synthetic oligonucleotide
  Description of Combined DNA/RNA Molecule: Synthetic oligonucleotide
  N-term hydroxyl group
  C-term hydroxyl group
  modified_base 1..1: /mod_base="OTHER" /note="2'-fluoro-nucleotide"
  modified_base 2..2: /mod_base="OTHER" /note="2'-fluoro-nucleotide"
  modified_base 3..3: /mod_base="OTHER" /note="2'-OMe-nucleotide"
  modified_base 4..4: /mod_base="OTHER" /note="2'-fluoro-nucleotide"
  modified_base 5..5: /mod_base="OTHER" /note="2'-OMe-nucleotide"
  modified_base 6..6: /mod_base="OTHER" /note="2'-fluoro-nucleotide"
  modified_base 7..7: /mod_base="OTHER" /note="2'-OMe-nucleotide"
  modified_base 8..8: /mod_base="OTHER" /note="2'-fluoro-nucleotide"
  modified_base 9..9: /mod_base="OTHER" /note="2'-OMe-nucleotide"
  modified_base 10..10: /mod_base="OTHER" /note="2'-fluoro-nucleotide"
  modified_base 11..11: /mod_base="OTHER" /note="2'-OMe-nucleotide"
  modified_base 12..12: /mod_base="OTHER" /note="2'-fluoro-nucleotide"
  modified_base 13..13: /mod_base="OTHER" /note="2'-OMe-nucleotide"
  modified_base 14..14: /mod_base="OTHER" /note="2'-fluoro-nucleotide"
  modified_base 15..15: /mod_base="OTHER" /note="2'-OMe-nucleotide"
  modified_base 16..16: /mod_base="OTHER" /note="2'-fluoro-nucleotide"
  modified_base 17..17: /mod_base="OTHER" /note="2'-OMe-nucleotide"
  modified_base 18..18: /mod_base="OTHER" /note="2'-fluoro-nucleotide"
  modified_base 19..19: /mod_base="OTHER" /note="2'-OMe-nucleotide"
  modified_base 20..20: /mod_base="OTHER" /note="dT"
  modified_base 21..21: /mod_base="OTHER" /note="dT"
aaaugaugaauugucuugatt

SEQ ID NO: 813 - DNA, 21 bp, Artificial Sequence
  Description of Artificial Sequence: Synthetic oligonucleotide
  Description of Combined DNA/RNA Molecule: Synthetic oligonucleotide
  N-term hydroxyl group
  C-term hydroxyl group
  modified_base 1..1: /mod_base="OTHER" /note="2'-fluoro-nucleotide"
  modified_base 2..2: /mod_base="OTHER" /note="2'-fluoro-nucleotide"
  modified_base 3..3: /mod_base="OTHER" /note="2'-OMe-nucleotide"
  modified_base 4..4: /mod_base="OTHER" /note="2'-fluoro-nucleotide"
  modified_base 5..5: /mod_base="OTHER" /note="2'-OMe-nucleotide"
  modified_base 6..6: /mod_base="OTHER" /note="2'-fluoro-nucleotide"
  modified_base 7..7: /mod_base="OTHER" /note="2'-OMe-nucleotide"
  modified_base 8..8: /mod_base="OTHER" /note="2'-fluoro-nucleotide"
  modified_base 9..9: /mod_base="OTHER" /note="2'-OMe-nucleotide"
  modified_base 10..10: /mod_base="OTHER" /note="2'-fluoro-nucleotide"
  modified_base 11..11: /mod_base="OTHER" /note="2'-OMe-nucleotide"
  modified_base 12..12: /mod_base="OTHER" /note="2'-fluoro-nucleotide"
  modified_base 13..13: /mod_base="OTHER" /note="2'-OMe-nucleotide"
  modified_base 14..14: /mod_base="OTHER" /note="2'-fluoro-nucleotide"
  modified_base 15..15: /mod_base="OTHER" /note="2'-OMe-nucleotide"
  modified_base 16..16: /mod_base="OTHER" /note="2'-fluoro-nucleotide"
  modified_base 17..17: /mod_base="OTHER" /note="2'-OMe-nucleotide"
  modified_base 18..18: /mod_base="OTHER" /note="2'-fluoro-nucleotide"
  modified_base 19..19: /mod_base="OTHER" /note="2'-OMe-nucleotide"
  modified_base 20..20: /mod_base="OTHER" /note="dT"
  modified_base 21..21: /mod_base="OTHER" /note="dT"
auagagaaucaaaugaugatt

SEQ ID NO: 814 - DNA, 21 bp, Artificial Sequence
  Description of Artificial Sequence: Synthetic oligonucleotide
  Description of Combined DNA/RNA Molecule: Synthetic oligonucleotide
  N-term hydroxyl group
  C-term hydroxyl group
  modified_base 1..1: /mod_base="OTHER" /note="2'-fluoro-nucleotide"
  modified_base 2..2: /mod_base="OTHER" /note="2'-fluoro-nucleotide"
  modified_base 3..3: /mod_base="OTHER" /note="2'-OMe-nucleotide"
  modified_base 4..4: /mod_base="OTHER" /note="2'-fluoro-nucleotide"
  modified_base 5..5: /mod_base="OTHER" /note="2'-OMe-nucleotide"
  modified_base 6..6: /mod_base="OTHER" /note="2'-fluoro-nucleotide"
  modified_base 7..7: /mod_base="OTHER" /note="2'-OMe-nucleotide"
  modified_base 8..8: /mod_base="OTHER" /note="2'-fluoro-nucleotide"
  modified_base 9..9: /mod_base="OTHER" /note="2'-OMe-nucleotide"
  modified_base 10..10: /mod_base="OTHER" /note="2'-fluoro-nucleotide"
  modified_base 11..11: /mod_base="OTHER" /note="2'-OMe-nucleotide"
  modified_base 12..12: /mod_base="OTHER" /note="2'-fluoro-nucleotide"
  modified_base 13..13: /mod_base="OTHER" /note="2'-OMe-nucleotide"
  modified_base 14..14: /mod_base="OTHER" /note="2'-fluoro-nucleotide"
  modified_base 15..15: /mod_base="OTHER" /note="2'-OMe-nucleotide"
  modified_base 16..16: /mod_base="OTHER" /note="2'-fluoro-nucleotide"
  modified_base 17..17: /mod_base="OTHER" /note="2'-OMe-nucleotide"
  modified_base 18..18: /mod_base="OTHER" /note="2'-fluoro-nucleotide"
  modified_base 19..19: /mod_base="OTHER" /note="2'-OMe-nucleotide"
  modified_base 20..20: /mod_base="OTHER" /note="dT"
  modified_base 21..21: /mod_base="OTHER" /note="dT"
gauagagaaucaaaugaugtt

SEQ ID NO: 815 - DNA, 21 bp, Artificial Sequence
  Description of Artificial Sequence: Synthetic oligonucleotide
  Description of Combined DNA/RNA Molecule: Synthetic oligonucleotide
  N-term hydroxyl group
  C-term hydroxyl group
  modified_base 1..1: /mod_base="OTHER" /note="2'-fluoro-nucleotide"
  modified_base 2..2: /mod_base="OTHER" /note="2'-fluoro-nucleotide"
  modified_base 3..3: /mod_base="OTHER" /note="2'-OMe-nucleotide"
  modified_base 4..4: /mod_base="OTHER" /note="2'-fluoro-nucleotide"
  modified_base 5..5: /mod_base="OTHER" /note="2'-OMe-nucleotide"
  modified_base 6..6: /mod_base="OTHER" /note="2'-fluoro-nucleotide"
  modified_base 7..7: /mod_base="OTHER" /note="2'-OMe-nucleotide"
  modified_base 8..8: /mod_base="OTHER" /note="2'-fluoro-nucleotide"
  modified_base 9..9: /mod_base="OTHER" /note="2'-OMe-nucleotide"
  modified_base 10..10: /mod_base="OTHER" /note="2'-fluoro-nucleotide"
  modified_base 11..11: /mod_base="OTHER" /note="2'-OMe-nucleotide"
  modified_base 12..12: /mod_base="OTHER" /note="2'-fluoro-nucleotide"
  modified_base 13..13: /mod_base="OTHER" /note="2'-OMe-nucleotide"
  modified_base 14..14: /mod_base="OTHER" /note="2'-fluoro-nucleotide"
  modified_base 15..15: /mod_base="OTHER" /note="2'-OMe-nucleotide"
  modified_base 16..16: /mod_base="OTHER" /note="2'-fluoro-nucleotide"
  modified_base 17..17: /mod_base="OTHER" /note="2'-OMe-nucleotide"
  modified_base 18..18: /mod_base="OTHER" /note="2'-fluoro-nucleotide"
  modified_base 19..19: /mod_base="OTHER" /note="2'-OMe-nucleotide"
  modified_base 20..20: /mod_base="OTHER" /note="dT"
  modified_base 21..21: /mod_base="OTHER" /note="dT"
agauagagaaucaaaugautt

SEQ ID NO: 816 - DNA, 21 bp, Artificial Sequence
  Description of Artificial Sequence: Synthetic oligonucleotide
  Description of Combined DNA/RNA Molecule: Synthetic oligonucleotide
  N-term hydroxyl group
  C-term hydroxyl group
  modified_base 1..1: /mod_base="OTHER" /note="2'-fluoro-nucleotide"
  modified_base 2..2: /mod_base="OTHER" /note="2'-fluoro-nucleotide"
  modified_base 3..3: /mod_base="OTHER" /note="2'-OMe-nucleotide"
  modified_base 4..4: /mod_base="OTHER" /note="2'-fluoro-nucleotide"
  modified_base 5..5: /mod_base="OTHER" /note="2'-OMe-nucleotide"
  modified_base 6..6: /mod_base="OTHER" /note="2'-fluoro-nucleotide"
  modified_base 7..7: /mod_base="OTHER" /note="2'-OMe-nucleotide"
  modified_base 8..8: /mod_base="OTHER" /note="2'-fluoro-nucleotide"
  modified_base 9..9: /mod_base="OTHER" /note="2'-OMe-nucleotide"
  modified_base 10..10: /mod_base="OTHER" /note="2'-fluoro-nucleotide"
  modified_base 11..11: /mod_base="OTHER" /note="2'-OMe-nucleotide"
  modified_base 12..12: /mod_base="OTHER" /note="2'-fluoro-nucleotide"
  modified_base 13..13: /mod_base="OTHER" /note="2'-OMe-nucleotide"
  modified_base 14..14: /mod_base="OTHER" /note="2'-fluoro-nucleotide"
  modified_base 15..15: /mod_base="OTHER" /note="2'-OMe-nucleotide"
  modified_base 16..16: /mod_base="OTHER" /note="2'-fluoro-nucleotide"
  modified_base 17..17: /mod_base="OTHER" /note="2'-OMe-nucleotide"
  modified_base 18..18: /mod_base="OTHER" /note="2'-fluoro-nucleotide"
  modified_base 19..19: /mod_base="OTHER" /note="2'-OMe-nucleotide"
  modified_base 20..20: /mod_base="OTHER" /note="dT"
  modified_base 21..21: /mod_base="OTHER" /note="dT"
cuucugagcugauuuucuatt

SEQ ID NO: 817 - DNA, 21 bp, Artificial Sequence
  Description of Artificial Sequence: Synthetic oligonucleotide
  Description of Combined DNA/RNA Molecule: Synthetic oligonucleotide
  N-term hydroxyl group
  C-term hydroxyl group
  modified_base 1..1: /mod_base="OTHER" /note="2'-fluoro-nucleotide"
  modified_base 2..2: /mod_base="OTHER" /note="2'-fluoro-nucleotide"
  modified_base 3..3: /mod_base="OTHER" /note="2'-OMe-nucleotide"
  modified_base 4..4: /mod_base="OTHER" /note="2'-fluoro-nucleotide"
  modified_base 5..5: /mod_base="OTHER" /note="2'-OMe-nucleotide"
  modified_base 6..6: /mod_base="OTHER" /note="2'-fluoro-nucleotide"
  modified_base 7..7: /mod_base="OTHER" /note="2'-OMe-nucleotide"
  modified_base 8..8: /mod_base="OTHER" /note="2'-fluoro-nucleotide"
  modified_base 9..9: /mod_base="OTHER" /note="2'-OMe-nucleotide"
  modified_base 10..10: /mod_base="OTHER" /note="2'-fluoro-nucleotide"
  modified_base 11..11: /mod_base="OTHER" /note="2'-OMe-nucleotide"
  modified_base 12..12: /mod_base="OTHER" /note="2'-fluoro-nucleotide"
  modified_base 13..13: /mod_base="OTHER" /note="2'-OMe-nucleotide"
  modified_base 14..14: /mod_base="OTHER" /note="2'-fluoro-nucleotide"
  modified_base 15..15: /mod_base="OTHER" /note="2'-OMe-nucleotide"
  modified_base 16..16: /mod_base="OTHER" /note="2'-fluoro-nucleotide"
  modified_base 17..17: /mod_base="OTHER" /note="2'-OMe-nucleotide"
  modified_base 18..18: /mod_base="OTHER" /note="2'-fluoro-nucleotide"
  modified_base 19..19: /mod_base="OTHER" /note="2'-OMe-nucleotide"
  modified_base 20..20: /mod_base="OTHER" /note="dT"
  modified_base 21..21: /mod_base="OTHER" /note="dT"
uccuucugagcugauuuuctt

SEQ ID NO: 818 - DNA, 21 bp, Artificial Sequence
  Description of Artificial Sequence: Synthetic oligonucleotide
  Description of Combined DNA/RNA Molecule: Synthetic oligonucleotide
  N-term hydroxyl group
  C-term hydroxyl group
  modified_base 1..1: /mod_base="OTHER" /note="2'-fluoro-nucleotide"
  modified_base 2..2: /mod_base="OTHER" /note="2'-fluoro-nucleotide"
  modified_base 3..3: /mod_base="OTHER" /note="2'-OMe-nucleotide"
  modified_base 4..4: /mod_base="OTHER" /note="2'-fluoro-nucleotide"
  modified_base 5..5: /mod_base="OTHER" /note="2'-OMe-nucleotide"
  modified_base 6..6: /mod_base="OTHER" /note="2'-fluoro-nucleotide"
  modified_base 7..7: /mod_base="OTHER" /note="2'-OMe-nucleotide"
  modified_base 8..8: /mod_base="OTHER" /note="2'-fluoro-nucleotide"
  modified_base 9..9: /mod_base="OTHER" /note="2'-OMe-nucleotide"
  modified_base 10..10: /mod_base="OTHER" /note="2'-fluoro-nucleotide"
  modified_base 11..11: /mod_base="OTHER" /note="2'-OMe-nucleotide"
  modified_base 12..12: /mod_base="OTHER" /note="2'-fluoro-nucleotide"
  modified_base 13..13: /mod_base="OTHER" /note="2'-OMe-nucleotide"
  modified_base 14..14: /mod_base="OTHER" /note="2'-fluoro-nucleotide"
  modified_base 15..15: /mod_base="OTHER" /note="2'-OMe-nucleotide"
  modified_base 16..16: /mod_base="OTHER" /note="2'-fluoro-nucleotide"
  modified_base 17..17: /mod_base="OTHER" /note="2'-OMe-nucleotide"
  modified_base 18..18: /mod_base="OTHER" /note="2'-fluoro-nucleotide"
  modified_base 19..19: /mod_base="OTHER" /note="2'-OMe-nucleotide"
  modified_base 20..20: /mod_base="OTHER" /note="dT"
  modified_base 21..21: /mod_base="OTHER" /note="dT"
guccuucugagcugauuuutt

SEQ ID NO: 819 - DNA, 21 bp, Artificial Sequence
  Description of Artificial Sequence: Synthetic oligonucleotide
  Description of Combined DNA/RNA Molecule: Synthetic oligonucleotide
  N-term hydroxyl group
  C-term hydroxyl group
  modified_base 1..1: /mod_base="OTHER" /note="2'-fluoro-nucleotide"
  modified_base 2..2: /mod_base="OTHER" /note="2'-fluoro-nucleotide"
  modified_base 3..3: /mod_base="OTHER" /note="2'-OMe-nucleotide"
  modified_base 4..4: /mod_base="OTHER" /note="2'-fluoro-nucleotide"
  modified_base 5..5: /mod_base="OTHER" /note="2'-OMe-nucleotide"
  modified_base 6..6: /mod_base="OTHER" /note="2'-fluoro-nucleotide"
  modified_base 7..7: /mod_base="OTHER" /note="2'-OMe-nucleotide"
  modified_base 8..8: /mod_base="OTHER" /note="2'-fluoro-nucleotide"
  modified_base 9..9: /mod_base="OTHER" /note="2'-OMe-nucleotide"
  modified_base 10..10: /mod_base="OTHER" /note="2'-fluoro-nucleotide"
  modified_base 11..11: /mod_base="OTHER" /note="2'-OMe-nucleotide"
  modified_base 12..12: /mod_base="OTHER" /note="2'-fluoro-nucleotide"
  modified_base 13..13: /mod_base="OTHER" /note="2'-OMe-nucleotide"
  modified_base 14..14: /mod_base="OTHER" /note="2'-fluoro-nucleotide"
  modified_base 15..15: /mod_base="OTHER" /note="2'-OMe-nucleotide"
  modified_base 16..16: /mod_base="OTHER" /note="2'-fluoro-nucleotide"
  modified_base 17..17: /mod_base="OTHER" /note="2'-OMe-nucleotide"
  modified_base 18..18: /mod_base="OTHER" /note="2'-fluoro-nucleotide"
  modified_base 19..19: /mod_base="OTHER" /note="2'-OMe-nucleotide"
  modified_base 20..20: /mod_base="OTHER" /note="dT"
  modified_base 21..21: /mod_base="OTHER" /note="dT"
aguccuucugagcugauuutt

SEQ ID NO: 820 - DNA, 21 bp, Artificial Sequence
  Description of Artificial Sequence: Synthetic oligonucleotide
  Description of Combined DNA/RNA Molecule: Synthetic oligonucleotide
  N-term hydroxyl group
  C-term hydroxyl group
  modified_base 1..1: /mod_base="OTHER" /note="2'-fluoro-nucleotide"
  modified_base 2..2: /mod_base="OTHER" /note="2'-fluoro-nucleotide"
  modified_base 3..3: /mod_base="OTHER" /note="2'-OMe-nucleotide"
  modified_base 4..4: /mod_base="OTHER" /note="2'-fluoro-nucleotide"
  modified_base 5..5: /mod_base="OTHER" /note="2'-OMe-nucleotide"
  modified_base 6..6: /mod_base="OTHER" /note="2'-fluoro-nucleotide"
  modified_base 7..7: /mod_base="OTHER" /note="2'-OMe-nucleotide"
  modified_base 8..8: /mod_base="OTHER" /note="2'-fluoro-nucleotide"
  modified_base 9..9: /mod_base="OTHER" /note="2'-OMe-nucleotide"
  modified_base 10..10: /mod_base="OTHER" /note="2'-fluoro-nucleotide"
  modified_base 11..11: /mod_base="OTHER" /note="2'-OMe-nucleotide"
  modified_base 12..12: /mod_base="OTHER" /note="2'-fluoro-nucleotide"
  modified_base 13..13: /mod_base="OTHER" /note="2'-OMe-nucleotide"
  modified_base 14..14: /mod_base="OTHER" /note="2'-fluoro-nucleotide"
  modified_base 15..15: /mod_base="OTHER" /note="2'-OMe-nucleotide"
  modified_base 16..16: /mod_base="OTHER" /note="2'-fluoro-nucleotide"
  modified_base 17..17: /mod_base="OTHER" /note="2'-OMe-nucleotide"
  modified_base 18..18: /mod_base="OTHER" /note="2'-fluoro-nucleotide"
  modified_base 19..19: /mod_base="OTHER" /note="2'-OMe-nucleotide"
  modified_base 20..20: /mod_base="OTHER" /note="dT"
  modified_base 21..21: /mod_base="OTHER" /note="dT"
uaguccuucugagcugauutt

SEQ ID NO: 821 - DNA, 21 bp, Artificial Sequence
  Description of Artificial Sequence: Synthetic oligonucleotide
  Description of Combined DNA/RNA Molecule: Synthetic oligonucleotide
  N-term hydroxyl group
  C-term hydroxyl group
  modified_base 1..1: /mod_base="OTHER" /note="2'-fluoro-nucleotide"
  modified_base 2..2: /mod_base="OTHER" /note="2'-fluoro-nucleotide"
  modified_base 3..3: /mod_base="OTHER" /note="2'-OMe-nucleotide"
  modified_base 4..4: /mod_base="OTHER" /note="2'-fluoro-nucleotide"
  modified_base 5..5: /mod_base="OTHER" /note="2'-OMe-nucleotide"
  modified_base 6..6: /mod_base="OTHER" /note="2'-fluoro-nucleotide"
  modified_base 7..7: /mod_base="OTHER" /note="2'-OMe-nucleotide"
  modified_base 8..8: /mod_base="OTHER" /note="2'-fluoro-nucleotide"
  modified_base 9..9: /mod_base="OTHER" /note="2'-OMe-nucleotide"
  modified_base 10..10: /mod_base="OTHER" /note="2'-fluoro-nucleotide"
  modified_base 11..11: /mod_base="OTHER" /note="2'-OMe-nucleotide"
  modified_base 12..12: /mod_base="OTHER" /note="2'-fluoro-nucleotide"
  modified_base 13..13: /mod_base="OTHER" /note="2'-OMe-nucleotide"
  modified_base 14..14: /mod_base="OTHER" /note="2'-fluoro-nucleotide"
  modified_base 15..15: /mod_base="OTHER" /note="2'-OMe-nucleotide"
  modified_base 16..16: /mod_base="OTHER" /note="2'-fluoro-nucleotide"
  modified_base 17..17: /mod_base="OTHER" /note="2'-OMe-nucleotide"
  modified_base 18..18: /mod_base="OTHER" /note="2'-fluoro-nucleotide"
  modified_base 19..19: /mod_base="OTHER" /note="2'-OMe-nucleotide"
  modified_base 20..20: /mod_base="OTHER" /note="dT"
  modified_base 21..21: /mod_base="OTHER" /note="dT"
auucagcaggaaugccauctt

SEQ ID NO: 822 - DNA, 21 bp, Artificial Sequence
  Description of Artificial Sequence: Synthetic oligonucleotide
  Description of Combined DNA/RNA Molecule: Synthetic oligonucleotide
  N-term hydroxyl group
  C-term hydroxyl group
  modified_base 1..1: /mod_base="OTHER" /note="2'-fluoro-nucleotide"
  modified_base 2..2: /mod_base="OTHER" /note="2'-fluoro-nucleotide"
  modified_base 3..3: /mod_base="OTHER" /note="2'-OMe-nucleotide"
  modified_base 4..4: /mod_base="OTHER" /note="2'-fluoro-nucleotide"
  modified_base 5..5: /mod_base="OTHER" /note="2'-OMe-nucleotide"
  modified_base 6..6: /mod_base="OTHER" /note="2'-fluoro-nucleotide"
  modified_base 7..7: /mod_base="OTHER" /note="2'-OMe-nucleotide"
  modified_base 8..8: /mod_base="OTHER" /note="2'-fluoro-nucleotide"
  modified_base 9..9: /mod_base="OTHER" /note="2'-OMe-nucleotide"
  modified_base 10..10: /mod_base="OTHER" /note="2'-fluoro-nucleotide"
  modified_base 11..11: /mod_base="OTHER" /note="2'-OMe-nucleotide"
  modified_base 12..12: /mod_base="OTHER" /note="2'-fluoro-nucleotide"
  modified_base 13..13: /mod_base="OTHER" /note="2'-OMe-nucleotide"
  modified_base 14..14: /mod_base="OTHER" /note="2'-fluoro-nucleotide"
  modified_base 15..15: /mod_base="OTHER" /note="2'-OMe-nucleotide"
  modified_base 16..16: /mod_base="OTHER" /note="2'-fluoro-nucleotide"
  modified_base 17..17: /mod_base="OTHER" /note="2'-OMe-nucleotide"
  modified_base 18..18: /mod_base="OTHER" /note="2'-fluoro-nucleotide"
  modified_base 19..19: /mod_base="OTHER" /note="2'-OMe-nucleotide"
  modified_base 20..20: /mod_base="OTHER" /note="dT"
  modified_base 21..21: /mod_base="OTHER" /note="dT"
gguacauucagcaggaaugtt

SEQ ID NO: 823 - DNA, 21 bp, Artificial Sequence
  Description of Artificial Sequence: Synthetic oligonucleotide
  Description of Combined DNA/RNA Molecule: Synthetic oligonucleotide
  N-term hydroxyl group
  C-term hydroxyl group
  modified_base 1..1: /mod_base="OTHER" /note="2'-fluoro-nucleotide"
  modified_base 2..2: /mod_base="OTHER" /note="2'-fluoro-nucleotide"
  modified_base 3..3: /mod_base="OTHER" /note="2'-OMe-nucleotide"
  modified_base 4..4: /mod_base="OTHER" /note="2'-fluoro-nucleotide"
  modified_base 5..5: /mod_base="OTHER" /note="2'-OMe-nucleotide"
  modified_base 6..6: /mod_base="OTHER" /note="2'-fluoro-nucleotide"
  modified_base 7..7: /mod_base="OTHER" /note="2'-OMe-nucleotide"
  modified_base 8..8: /mod_base="OTHER" /note="2'-fluoro-nucleotide"
  modified_base 9..9: /mod_base="OTHER" /note="2'-OMe-nucleotide"
  modified_base 10..10: /mod_base="OTHER" /note="2'-fluoro-nucleotide"
  modified_base 11..11: /mod_base="OTHER" /note="2'-OMe-nucleotide"
  modified_base 12..12: /mod_base="OTHER" /note="2'-fluoro-nucleotide"
  modified_base 13..13: /mod_base="OTHER" /note="2'-OMe-nucleotide"
  modified_base 14..14: /mod_base="OTHER" /note="2'-fluoro-nucleotide"
  modified_base 15..15: /mod_base="OTHER" /note="2'-OMe-nucleotide"
  modified_base 16..16: /mod_base="OTHER" /note="2'-fluoro-nucleotide"
  modified_base 17..17: /mod_base="OTHER" /note="2'-OMe-nucleotide"
  modified_base 18..18: /mod_base="OTHER" /note="2'-fluoro-nucleotide"
  modified_base 19..19: /mod_base="OTHER" /note="2'-OMe-nucleotide"
  modified_base 20..20: /mod_base="OTHER" /note="dT"
  modified_base 21..21: /mod_base="OTHER" /note="dT"
ggugguacauucagcaggatt

SEQ ID NO: 824 - DNA, 21 bp, Artificial Sequence
  Description of Artificial Sequence: Synthetic oligonucleotide
  Description of Combined DNA/RNA Molecule: Synthetic oligonucleotide
  N-term hydroxyl group
  C-term hydroxyl group
  modified_base 1..1: /mod_base="OTHER" /note="2'-fluoro-nucleotide"
  modified_base 2..2: /mod_base="OTHER" /note="2'-fluoro-nucleotide"
  modified_base 3..3: /mod_base="OTHER" /note="2'-OMe-nucleotide"
  modified_base 4..4: /mod_base="OTHER" /note="2'-fluoro-nucleotide"
  modified_base 5..5: /mod_base="OTHER" /note="2'-OMe-nucleotide"
  modified_base 6..6: /mod_base="OTHER" /note="2'-fluoro-nucleotide"
  modified_base 7..7: /mod_base="OTHER" /note="2'-OMe-nucleotide"
  modified_base 8..8: /mod_base="OTHER" /note="2'-fluoro-nucleotide"
  modified_base 9..9: /mod_base="OTHER" /note="2'-OMe-nucleotide"
  modified_base 10..10: /mod_base="OTHER" /note="2'-fluoro-nucleotide"
  modified_base 11..11: /mod_base="OTHER" /note="2'-OMe-nucleotide"
  modified_base 12..12: /mod_base="OTHER" /note="2'-fluoro-nucleotide"
  modified_base 13..13: /mod_base="OTHER" /note="2'-OMe-nucleotide"
  modified_base 14..14: /mod_base="OTHER" /note="2'-fluoro-nucleotide"
  modified_base 15..15: /mod_base="OTHER" /note="2'-OMe-nucleotide"
  modified_base 16..16: /mod_base="OTHER" /note="2'-fluoro-nucleotide"
  modified_base 17..17: /mod_base="OTHER" /note="2'-OMe-nucleotide"
  modified_base 18..18: /mod_base="OTHER" /note="2'-fluoro-nucleotide"
  modified_base 19..19: /mod_base="OTHER" /note="2'-OMe-nucleotide"
  modified_base 20..20: /mod_base="OTHER" /note="dT"
  modified_base 21..21: /mod_base="OTHER" /note="dT"
auggugguacauucagcagtt

SEQ ID NO: 825 - DNA, 21 bp, Artificial Sequence
  Description of Artificial Sequence: Synthetic oligonucleotide
  Description of Combined DNA/RNA Molecule: Synthetic oligonucleotide
  N-term hydroxyl group
  C-term hydroxyl group
  modified_base 1..1: /mod_base="OTHER" /note="2'-fluoro-nucleotide"
  modified_base 2..2: /mod_base="OTHER" /note="2'-fluoro-nucleotide"
  modified_base 3..3: /mod_base="OTHER" /note="2'-OMe-nucleotide"
  modified_base 4..4: /mod_base="OTHER" /note="2'-fluoro-nucleotide"
  modified_base 5..5: /mod_base="OTHER" /note="2'-OMe-nucleotide"
  modified_base 6..6: /mod_base="OTHER" /note="2'-fluoro-nucleotide"
  modified_base 7..7: /mod_base="OTHER" /note="2'-OMe-nucleotide"
  modified_base 8..8: /mod_base="OTHER" /note="2'-fluoro-nucleotide"
  modified_base 9..9: /mod_base="OTHER" /note="2'-OMe-nucleotide"
  modified_base 10..10: /mod_base="OTHER" /note="2'-fluoro-nucleotide"
  modified_base 11..11: /mod_base="OTHER" /note="2'-OMe-nucleotide"
  modified_base 12..12: /mod_base="OTHER" /note="2'-fluoro-nucleotide"
  modified_base 13..13: /mod_base="OTHER" /note="2'-OMe-nucleotide"
  modified_base 14..14: /mod_base="OTHER" /note="2'-fluoro-nucleotide"
  modified_base 15..15: /mod_base="OTHER" /note="2'-OMe-nucleotide"
  modified_base 16..16: /mod_base="OTHER" /note="2'-fluoro-nucleotide"
  modified_base 17..17: /mod_base="OTHER" /note="2'-OMe-nucleotide"
  modified_base 18..18: /mod_base="OTHER" /note="2'-fluoro-nucleotide"
  modified_base 19..19: /mod_base="OTHER" /note="2'-OMe-nucleotide"
  modified_base 20..20: /mod_base="OTHER" /note="dT"
  modified_base 21..21: /mod_base="OTHER" /note="dT"
aauggugguacauucagcatt

SEQ ID NO: 826 - DNA, 21 bp, Artificial Sequence
  Description of Artificial Sequence: Synthetic oligonucleotide
  Description of Combined DNA/RNA Molecule: Synthetic oligonucleotide
  N-term hydroxyl group
  C-term hydroxyl group
  modified_base 1..1: /mod_base="OTHER" /note="2'-fluoro-nucleotide"
  modified_base 2..2: /mod_base="OTHER" /note="2'-fluoro-nucleotide"
  modified_base 3..3: /mod_base="OTHER" /note="2'-OMe-nucleotide"
  modified_base 4..4: /mod_base="OTHER" /note="2'-fluoro-nucleotide"
  modified_base 5..5: /mod_base="OTHER" /note="2'-OMe-nucleotide"
  modified_base 6..6: /mod_base="OTHER" /note="2'-fluoro-nucleotide"
  modified_base 7..7: /mod_base="OTHER" /note="2'-OMe-nucleotide"
  modified_base 8..8: /mod_base="OTHER" /note="2'-fluoro-nucleotide"
  modified_base 9..9: /mod_base="OTHER" /note="2'-OMe-nucleotide"
  modified_base 10..10: /mod_base="OTHER" /note="2'-fluoro-nucleotide"
  modified_base 11..11: /mod_base="OTHER" /note="2'-OMe-nucleotide"
  modified_base 12..12: /mod_base="OTHER" /note="2'-fluoro-nucleotide"
  modified_base 13..13: /mod_base="OTHER" /note="2'-OMe-nucleotide"
  modified_base 14..14: /mod_base="OTHER" /note="2'-fluoro-nucleotide"
  modified_base 15..15: /mod_base="OTHER" /note="2'-OMe-nucleotide"
  modified_base 16..16: /mod_base="OTHER" /note="2'-fluoro-nucleotide"
  modified_base 17..17: /mod_base="OTHER" /note="2'-OMe-nucleotide"
  modified_base 18..18: /mod_base="OTHER" /note="2'-fluoro-nucleotide"
  modified_base 19..19: /mod_base="OTHER" /note="2'-OMe-nucleotide"
  modified_base 20..20: /mod_base="OTHER" /note="dT"
  modified_base 21..21: /mod_base="OTHER" /note="dT"
aaauggugguacauucagctt

SEQ ID NO: 827 - DNA, 21 bp, Artificial Sequence
  Description of Artificial Sequence: Synthetic oligonucleotide
  Description of Combined DNA/RNA Molecule: Synthetic oligonucleotide
  N-term hydroxyl group
  C-term hydroxyl group
  modified_base 1..1: /mod_base="OTHER" /note="2'-fluoro-nucleotide"
  modified_base 2..2: /mod_base="OTHER" /note="2'-fluoro-nucleotide"
  modified_base 3..3: /mod_base="OTHER" /note="2'-OMe-nucleotide"
  modified_base 4..4: /mod_base="OTHER" /note="2'-fluoro-nucleotide"
  modified_base 5..5: /mod_base="OTHER" /note="2'-OMe-nucleotide"
  modified_base 6..6: /mod_base="OTHER" /note="2'-fluoro-nucleotide"
  modified_base 7..7: /mod_base="OTHER" /note="2'-OMe-nucleotide"
  modified_base 8..8: /mod_base="OTHER" /note="2'-fluoro-nucleotide"
  modified_base 9..9: /mod_base="OTHER" /note="2'-OMe-nucleotide"
  modified_base 10..10: /mod_base="OTHER" /note="2'-fluoro-nucleotide"
  modified_base 11..11: /mod_base="OTHER" /note="2'-OMe-nucleotide"
  modified_base 12..12: /mod_base="OTHER" /note="2'-fluoro-nucleotide"
  modified_base 13..13: /mod_base="OTHER" /note="2'-OMe-nucleotide"
  modified_base 14..14: /mod_base="OTHER" /note="2'-fluoro-nucleotide"
  modified_base 15..15: /mod_base="OTHER" /note="2'-OMe-nucleotide"
  modified_base 16..16: /mod_base="OTHER" /note="2'-fluoro-nucleotide"
  modified_base 17..17: /mod_base="OTHER" /note="2'-OMe-nucleotide"
  modified_base 18..18: /mod_base="OTHER" /note="2'-fluoro-nucleotide"
  modified_base 19..19: /mod_base="OTHER" /note="2'-OMe-nucleotide"
  modified_base 20..20: /mod_base="OTHER" /note="dT"
  modified_base 21..21: /mod_base="OTHER" /note="dT"
uaaauggugguacauucagtt

SEQ ID NO: 828 - DNA, 21 bp, Artificial Sequence
  Description of Artificial Sequence: Synthetic oligonucleotide
  Description of Combined DNA/RNA Molecule: Synthetic oligonucleotide
  N-term hydroxyl group
  C-term hydroxyl group
  modified_base 1..1: /mod_base="OTHER" /note="2'-fluoro-nucleotide"
  modified_base 2..2: /mod_base="OTHER" /note="2'-fluoro-nucleotide"
  modified_base 3..3: /mod_base="OTHER" /note="2'-OMe-nucleotide"
  modified_base 4..4: /mod_base="OTHER" /note="2'-fluoro-nucleotide"
  modified_base 5..5: /mod_base="OTHER" /note="2'-OMe-nucleotide"
  modified_base 6..6: /mod_base="OTHER" /note="2'-fluoro-nucleotide"
  modified_base 7..7: /mod_base="OTHER" /note="2'-OMe-nucleotide"
  modified_base 8..8: /mod_base="OTHER" /note="2'-fluoro-nucleotide"
  modified_base 9..9: /mod_base="OTHER" /note="2'-OMe-nucleotide"
  modified_base 10..10: /mod_base="OTHER" /note="2'-fluoro-nucleotide"
  modified_base 11..11: /mod_base="OTHER" /note="2'-OMe-nucleotide"
  modified_base 12..12: /mod_base="OTHER" /note="2'-fluoro-nucleotide"
  modified_base 13..13: /mod_base="OTHER" /note="2'-OMe-nucleotide"
  modified_base 14..14: /mod_base="OTHER" /note="2'-fluoro-nucleotide"
  modified_base 15..15: /mod_base="OTHER" /note="2'-OMe-nucleotide"
  modified_base 16..16: /mod_base="OTHER" /note="2'-fluoro-nucleotide"
  modified_base 17..17: /mod_base="OTHER" /note="2'-OMe-nucleotide"
  modified_base 18..18: /mod_base="OTHER" /note="2'-fluoro-nucleotide"
  modified_base 19..19: /mod_base="OTHER" /note="2'-OMe-nucleotide"
  modified_base 20..20: /mod_base="OTHER" /note="dT"
  modified_base 21..21: /mod_base="OTHER" /note="dT"
cacuuguauguucaccucutt

SEQ ID NO: 829 - DNA, 21 bp, Artificial Sequence
  Description of Artificial Sequence: Synthetic oligonucleotide
  Description of Combined DNA/RNA Molecule: Synthetic oligonucleotide
  N-term hydroxyl group
  C-term hydroxyl group
  modified_base 1..1: /mod_base="OTHER" /note="2'-fluoro-nucleotide"
  modified_base 2..2: /mod_base="OTHER" /note="2'-fluoro-nucleotide"
  modified_base 3..3: /mod_base="OTHER" /note="2'-OMe-nucleotide"
  modified_base 4..4: /mod_base="OTHER" /note="2'-fluoro-nucleotide"
  modified_base 5..5: /mod_base="OTHER" /note="2'-OMe-nucleotide"
  modified_base 6..6: /mod_base="OTHER" /note="2'-fluoro-nucleotide"
  modified_base 7..7: /mod_base="OTHER" /note="2'-OMe-nucleotide"
  modified_base 8..8: /mod_base="OTHER" /note="2'-fluoro-nucleotide"
  modified_base 9..9: /mod_base="OTHER" /note="2'-OMe-nucleotide"
  modified_base 10..10: /mod_base="OTHER" /note="2'-fluoro-nucleotide"
  modified_base 11..11: /mod_base="OTHER" /note="2'-OMe-nucleotide"
  modified_base 12..12: /mod_base="OTHER" /note="2'-fluoro-nucleotide"
  modified_base 13..13: /mod_base="OTHER" /note="2'-OMe-nucleotide"
  modified_base 14..14: /mod_base="OTHER" /note="2'-fluoro-nucleotide"
  modified_base 15..15: /mod_base="OTHER" /note="2'-OMe-nucleotide"
  modified_base 16..16: /mod_base="OTHER" /note="2'-fluoro-nucleotide"
  modified_base 17..17: /mod_base="OTHER" /note="2'-OMe-nucleotide"
  modified_base 18..18: /mod_base="OTHER" /note="2'-fluoro-nucleotide"
  modified_base 19..19: /mod_base="OTHER" /note="2'-OMe-nucleotide"
  modified_base 20..20: /mod_base="OTHER" /note="dT"
  modified_base 21..21: /mod_base="OTHER" /note="dT"
ccacuuguauguucaccuctt

SEQ ID NO: 830 - DNA, 21 bp, Artificial Sequence
  Description of Artificial Sequence: Synthetic oligonucleotide
  Description of Combined DNA/RNA Molecule: Synthetic oligonucleotide
  N-term hydroxyl group
  C-term hydroxyl group
  modified_base 1..1: /mod_base="OTHER" /note="2'-fluoro-nucleotide"
  modified_base 2..2: /mod_base="OTHER" /note="2'-fluoro-nucleotide"
  modified_base 3..3: /mod_base="OTHER" /note="2'-OMe-nucleotide"
  modified_base 4..4: /mod_base="OTHER" /note="2'-fluoro-nucleotide"
  modified_base 5..5: /mod_base="OTHER" /note="2'-OMe-nucleotide"
  modified_base 6..6: /mod_base="OTHER" /note="2'-fluoro-nucleotide"
  modified_base 7..7: /mod_base="OTHER" /note="2'-OMe-nucleotide"
  modified_base 8..8: /mod_base="OTHER" /note="2'-fluoro-nucleotide"
  modified_base 9..9: /mod_base="OTHER" /note="2'-OMe-nucleotide"
  modified_base 10..10: /mod_base="OTHER" /note="2'-fluoro-nucleotide"
  modified_base 11..11: /mod_base="OTHER" /note="2'-OMe-nucleotide"
  modified_base 12..12: /mod_base="OTHER" /note="2'-fluoro-nucleotide"
  modified_base 13..13: /mod_base="OTHER" /note="2'-OMe-nucleotide"
  modified_base 14..14: /mod_base="OTHER" /note="2'-fluoro-nucleotide"
  modified_base 15..15: /mod_base="OTHER" /note="2'-OMe-nucleotide"
  modified_base 16..16: /mod_base="OTHER" /note="2'-fluoro-nucleotide"
  modified_base 17..17: /mod_base="OTHER" /note="2'-OMe-nucleotide"
  modified_base 18..18: /mod_base="OTHER" /note="2'-fluoro-nucleotide"
  modified_base 19..19: /mod_base="OTHER" /note="2'-OMe-nucleotide"
  modified_base 20..20: /mod_base="OTHER" /note="dT"
  modified_base 21..21: /mod_base="OTHER" /note="dT"
gccacuuguauguucaccutt

SEQ ID NO: 831 - DNA, 21 bp, Artificial Sequence
  Description of Artificial Sequence: Synthetic oligonucleotide
  Description of Combined DNA/RNA Molecule: Synthetic oligonucleotide
  N-term hydroxyl group
  C-term hydroxyl group
  modified_base 1..1: /mod_base="OTHER" /note="2'-fluoro-nucleotide"
  modified_base 2..2: /mod_base="OTHER" /note="2'-fluoro-nucleotide"
  modified_base 3..3: /mod_base="OTHER" /note="2'-OMe-nucleotide"
  modified_base 4..4: /mod_base="OTHER" /note="2'-fluoro-nucleotide"
  modified_base 5..5: /mod_base="OTHER" /note="2'-OMe-nucleotide"
  modified_base 6..6: /mod_base="OTHER" /note="2'-fluoro-nucleotide"
  modified_base 7..7: /mod_base="OTHER" /note="2'-OMe-nucleotide"
  modified_base 8..8: /mod_base="OTHER" /note="2'-fluoro-nucleotide"
  modified_base 9..9: /mod_base="OTHER" /note="2'-OMe-nucleotide"
  modified_base 10..10: /mod_base="OTHER" /note="2'-fluoro-nucleotide"
  modified_base 11..11: /mod_base="OTHER" /note="2'-OMe-nucleotide"
  modified_base 12..12: /mod_base="OTHER" /note="2'-fluoro-nucleotide"
  modified_base 13..13: /mod_base="OTHER" /note="2'-OMe-nucleotide"
  modified_base 14..14: /mod_base="OTHER" /note="2'-fluoro-nucleotide"
  modified_base 15..15: /mod_base="OTHER" /note="2'-OMe-nucleotide"
  modified_base 16..16: /mod_base="OTHER" /note="2'-fluoro-nucleotide"
  modified_base 17..17: /mod_base="OTHER" /note="2'-OMe-nucleotide"
  modified_base 18..18: /mod_base="OTHER" /note="2'-fluoro-nucleotide"
  modified_base 19..19: /mod_base="OTHER" /note="2'-OMe-nucleotide"
  modified_base 20..20: /mod_base="OTHER" /note="dT"
  modified_base 21..21: /mod_base="OTHER" /note="dT"
ugccacuuguauguucacctt

SEQ ID NO: 832 - DNA, 21 bp, Artificial Sequence
  Description of Artificial Sequence: Synthetic oligonucleotide
  Description of Combined DNA/RNA Molecule: Synthetic oligonucleotide
  N-term hydroxyl group
  C-term hydroxyl group
  modified_base 1..1: /mod_base="OTHER" /note="2'-fluoro-nucleotide"
  modified_base 2..2: /mod_base="OTHER" /note="2'-fluoro-nucleotide"
  modified_base 3..3: /mod_base="OTHER" /note="2'-OMe-nucleotide"
  modified_base 4..4: /mod_base="OTHER" /note="2'-fluoro-nucleotide"
  modified_base 5..5: /mod_base="OTHER" /note="2'-OMe-nucleotide"
  modified_base 6..6: /mod_base="OTHER" /note="2'-fluoro-nucleotide"
  modified_base 7..7: /mod_base="OTHER" /note="2'-OMe-nucleotide"
  modified_base 8..8: /mod_base="OTHER" /note="2'-fluoro-nucleotide"
  modified_base 9..9: /mod_base="OTHER" /note="2'-OMe-nucleotide"
  modified_base 10..10: /mod_base="OTHER" /note="2'-fluoro-nucleotide"
  modified_base 11..11: /mod_base="OTHER" /note="2'-OMe-nucleotide"
  modified_base 12..12: /mod_base="OTHER" /note="2'-fluoro-nucleotide"
  modified_base 13..13: /mod_base="OTHER" /note="2'-OMe-nucleotide"
  modified_base 14..14: /mod_base="OTHER" /note="2'-fluoro-nucleotide"
  modified_base 15..15: /mod_base="OTHER" /note="2'-OMe-nucleotide"
  modified_base 16..16: /mod_base="OTHER" /note="2'-fluoro-nucleotide"
  modified_base 17..17: /mod_base="OTHER" /note="2'-OMe-nucleotide"
  modified_base 18..18: /mod_base="OTHER" /note="2'-fluoro-nucleotide"
  modified_base 19..19: /mod_base="OTHER" /note="2'-OMe-nucleotide"
  modified_base 20..20: /mod_base="OTHER" /note="dT"
  modified_base 21..21: /mod_base="OTHER" /note="dT"
gauggcauacaugccacuutt

SEQ ID NO: 833 - DNA, 21 bp, Artificial Sequence
  Description of Artificial Sequence: Synthetic oligonucleotide
  Description of Combined DNA/RNA Molecule: Synthetic oligonucleotide
  N-term hydroxyl group
  C-term hydroxyl group
  modified_base 1..1: /mod_base="OTHER" /note="2'-fluoro-nucleotide"
  modified_base 2..2: /mod_base="OTHER" /note="2'-fluoro-nucleotide"
  modified_base 3..3: /mod_base="OTHER" /note="2'-OMe-nucleotide"
  modified_base 4..4: /mod_base="OTHER" /note="2'-fluoro-nucleotide"
  modified_base 5..5: /mod_base="OTHER" /note="2'-OMe-nucleotide"
  modified_base 6..6: /mod_base="OTHER" /note="2'-fluoro-nucleotide"
  modified_base 7..7: /mod_base="OTHER" /note="2'-OMe-nucleotide"
  modified_base 8..8: /mod_base="OTHER" /note="2'-fluoro-nucleotide"
  modified_base 9..9: /mod_base="OTHER" /note="2'-OMe-nucleotide"
  modified_base 10..10: /mod_base="OTHER" /note="2'-fluoro-nucleotide"
  modified_base 11..11: /mod_base="OTHER" /note="2'-OMe-nucleotide"
  modified_base 12..12: /mod_base="OTHER" /note="2'-fluoro-nucleotide"
  modified_base 13..13: /mod_base="OTHER" /note="2'-OMe-nucleotide"
  modified_base 14..14: /mod_base="OTHER" /note="2'-fluoro-nucleotide"
  modified_base 15..15: /mod_base="OTHER" /note="2'-OMe-nucleotide"
  modified_base 16..16: /mod_base="OTHER" /note="2'-fluoro-nucleotide"
  modified_base 17..17: /mod_base="OTHER" /note="2'-OMe-nucleotide"
  modified_base 18..18: /mod_base="OTHER" /note="2'-fluoro-nucleotide"
  modified_base 19..19: /mod_base="OTHER" /note="2'-OMe-nucleotide"
  modified_base 20..20: /mod_base="OTHER" /note="dT"
  modified_base 21..21: /mod_base="OTHER" /note="dT"
ugauggcauacaugccacutt

SEQ ID NO: 834 - DNA, 21 bp, Artificial Sequence
  Description of Artificial Sequence: Synthetic oligonucleotide
  Description of Combined DNA/RNA Molecule: Synthetic oligonucleotide
  N-term hydroxyl group
  C-term hydroxyl group
  modified_base 1..1: /mod_base="OTHER" /note="2'-fluoro-nucleotide"
  modified_base 2..2: /mod_base="OTHER" /note="2'-fluoro-nucleotide"
  modified_base 3..3: /mod_base="OTHER" /note="2'-OMe-nucleotide"
  modified_base 4..4: /mod_base="OTHER" /note="2'-fluoro-nucleotide"
  modified_base 5..5: /mod_base="OTHER" /note="2'-OMe-nucleotide"
  modified_base 6..6: /mod_base="OTHER" /note="2'-fluoro-nucleotide"
  modified_base 7..7: /mod_base="OTHER" /note="2'-OMe-nucleotide"
  modified_base 8..8: /mod_base="OTHER" /note="2'-fluoro-nucleotide"
  modified_base 9..9: /mod_base="OTHER" /note="2'-OMe-nucleotide"
  modified_base 10..10: /mod_base="OTHER" /note="2'-fluoro-nucleotide"
  modified_base 11..11: /mod_base="OTHER" /note="2'-OMe-nucleotide"
  modified_base 12..12: /mod_base="OTHER" /note="2'-fluoro-nucleotide"
  modified_base 13..13: /mod_base="OTHER" /note="2'-OMe-nucleotide"
  modified_base 14..14: /mod_base="OTHER" /note="2'-fluoro-nucleotide"
  modified_base 15..15: /mod_base="OTHER" /note="2'-OMe-nucleotide"
  modified_base 16..16: /mod_base="OTHER" /note="2'-fluoro-nucleotide"
  modified_base 17..17: /mod_base="OTHER" /note="2'-OMe-nucleotide"
  modified_base 18..18: /mod_base="OTHER" /note="2'-fluoro-nucleotide"
  modified_base 19..19: /mod_base="OTHER" /note="2'-OMe-nucleotide"
  modified_base 20..20: /mod_base="OTHER" /note="dT"
  modified_base 21..21: /mod_base="OTHER" /note="dT"
cugauggcauacaugccactt

SEQ ID NO: 835 - DNA, 21 bp, Artificial Sequence
  Description of Artificial Sequence: Synthetic oligonucleotide
  Description of Combined DNA/RNA Molecule: Synthetic oligonucleotide
  N-term hydroxyl group
  C-term hydroxyl group
  modified_base 1..1: /mod_base="OTHER" /note="2'-fluoro-nucleotide"
  modified_base 2..2: /mod_base="OTHER" /note="2'-fluoro-nucleotide"
  modified_base 3..3: /mod_base="OTHER" /note="2'-OMe-nucleotide"
  modified_base 4..4: /mod_base="OTHER" /note="2'-fluoro-nucleotide"
  modified_base 5..5: /mod_base="OTHER" /note="2'-OMe-nucleotide"
  modified_base 6..6: /mod_base="OTHER" /note="2'-fluoro-nucleotide"
  modified_base 7..7: /mod_base="OTHER" /note="2'-OMe-nucleotide"
  modified_base 8..8: /mod_base="OTHER" /note="2'-fluoro-nucleotide"
  modified_base 9..9: /mod_base="OTHER" /note="2'-OMe-nucleotide"
  modified_base 10..10: /mod_base="OTHER" /note="2'-fluoro-nucleotide"
  modified_base 11..11: /mod_base="OTHER" /note="2'-OMe-nucleotide"
  modified_base 12..12: /mod_base="OTHER" /note="2'-fluoro-nucleotide"
  modified_base 13..13: /mod_base="OTHER" /note="2'-OMe-nucleotide"
  modified_base 14..14: /mod_base="OTHER" /note="2'-fluoro-nucleotide"
  modified_base 15..15: /mod_base="OTHER" /note="2'-OMe-nucleotide"
  modified_base 16..16: /mod_base="OTHER" /note="2'-fluoro-nucleotide"
  modified_base 17..17: /mod_base="OTHER" /note="2'-OMe-nucleotide"
  modified_base 18..18: /mod_base="OTHER" /note="2'-fluoro-nucleotide"
  modified_base 19..19: /mod_base="OTHER" /note="2'-OMe-nucleotide"
  modified_base 20..20: /mod_base="OTHER" /note="dT"
  modified_base 21..21: /mod_base="OTHER" /note="dT"
ucugauggcauacaugccatt

SEQ ID NO: 836 - DNA, 21 bp, Artificial Sequence
  Description of Artificial Sequence: Synthetic oligonucleotide
  Description of Combined DNA/RNA Molecule: Synthetic oligonucleotide
  N-term hydroxyl group
  C-term hydroxyl group
  modified_base 1..1: /mod_base="OTHER" /note="2'-fluoro-nucleotide"
  modified_base 2..2: /mod_base="OTHER" /note="2'-fluoro-nucleotide"
  modified_base 3..3: /mod_base="OTHER" /note="2'-OMe-nucleotide"
  modified_base 4..4: /mod_base="OTHER" /note="2'-fluoro-nucleotide"
  modified_base 5..5: /mod_base="OTHER" /note="2'-OMe-nucleotide"
  modified_base 6..6: /mod_base="OTHER" /note="2'-fluoro-nucleotide"
  modified_base 7..7: /mod_base="OTHER" /note="2'-OMe-nucleotide"
  modified_base 8..8: /mod_base="OTHER" /note="2'-fluoro-nucleotide"
  modified_base 9..9: /mod_base="OTHER" /note="2'-OMe-nucleotide"
  modified_base 10..10: /mod_base="OTHER" /note="2'-fluoro-nucleotide"
  modified_base 11..11: /mod_base="OTHER" /note="2'-OMe-nucleotide"
  modified_base 12..12: /mod_base="OTHER" /note="2'-fluoro-nucleotide"
  modified_base 13..13: /mod_base="OTHER" /note="2'-OMe-nucleotide"
  modified_base 14..14: /mod_base="OTHER" /note="2'-fluoro-nucleotide"
  modified_base 15..15: /mod_base="OTHER" /note="2'-OMe-nucleotide"
  modified_base 16..16: /mod_base="OTHER" /note="2'-fluoro-nucleotide"
  modified_base 17..17: /mod_base="OTHER" /note="2'-OMe-nucleotide"
  modified_base 18..18: /mod_base="OTHER" /note="2'-fluoro-nucleotide"
  modified_base 19..19: /mod_base="OTHER" /note="2'-OMe-nucleotide"
  modified_base 20..20: /mod_base="OTHER" /note="dT"
  modified_base 21..21: /mod_base="OTHER" /note="dT"
aacuagauguagcguauagtt

SEQ ID NO: 837 - DNA, 21 bp, Artificial Sequence
  Description of Artificial Sequence: Synthetic oligonucleotide
  Description of Combined DNA/RNA Molecule: Synthetic oligonucleotide
  N-term hydroxyl group
  C-term hydroxyl group
  modified_base 1..1: /mod_base="OTHER" /note="2'-fluoro-nucleotide"
  modified_base 2..2: /mod_base="OTHER" /note="2'-fluoro-nucleotide"
  modified_base 3..3: /mod_base="OTHER" /note="2'-OMe-nucleotide"
  modified_base 4..4: /mod_base="OTHER" /note="2'-fluoro-nucleotide"
  modified_base 5..5: /mod_base="OTHER" /note="2'-OMe-nucleotide"
  modified_base 6..6: /mod_base="OTHER" /note="2'-fluoro-nucleotide"
  modified_base 7..7: /mod_base="OTHER" /note="2'-OMe-nucleotide"
  modified_base 8..8: /mod_base="OTHER" /note="2'-fluoro-nucleotide"
  modified_base 9..9: /mod_base="OTHER" /note="2'-OMe-nucleotide"
  modified_base 10..10: /mod_base="OTHER" /note="2'-fluoro-nucleotide"
  modified_base 11..11: /mod_base="OTHER" /note="2'-OMe-nucleotide"
  modified_base 12..12: /mod_base="OTHER" /note="2'-fluoro-nucleotide"
  modified_base 13..13: /mod_base="OTHER" /note="2'-OMe-nucleotide"
  modified_base 14..14: /mod_base="OTHER" /note="2'-fluoro-nucleotide"
  modified_base 15..15: /mod_base="OTHER" /note="2'-OMe-nucleotide"
  modified_base 16..16: /mod_base="OTHER" /note="2'-fluoro-nucleotide"
  modified_base 17..17: /mod_base="OTHER" /note="2'-OMe-nucleotide"
  modified_base 18..18: /mod_base="OTHER" /note="2'-fluoro-nucleotide"
  modified_base 19..19: /mod_base="OTHER" /note="2'-OMe-nucleotide"
  modified_base 20..20: /mod_base="OTHER" /note="dT"
  modified_base 21..21: /mod_base="OTHER" /note="dT"
caguugaaguguccuuuugtt

SEQ ID NO: 838 - DNA, 21 bp, Artificial Sequence
  Description of Artificial Sequence: Synthetic oligonucleotide
  Description of Combined DNA/RNA Molecule: Synthetic oligonucleotide
  N-term hydroxyl group
  C-term hydroxyl group
  modified_base 1..1: /mod_base="OTHER" /note="2'-fluoro-nucleotide"
  modified_base 2..2: /mod_base="OTHER" /note="2'-fluoro-nucleotide"
  modified_base 3..3: /mod_base="OTHER" /note="2'-OMe-nucleotide"
  modified_base 4..4: /mod_base="OTHER" /note="2'-fluoro-nucleotide"
  modified_base 5..5: /mod_base="OTHER" /note="2'-OMe-nucleotide"
  modified_base 6..6: /mod_base="OTHER" /note="2'-fluoro-nucleotide"
  modified_base 7..7: /mod_base="OTHER" /note="2'-OMe-nucleotide"
  modified_base 8..8: /mod_base="OTHER" /note="2'-fluoro-nucleotide"
  modified_base 9..9: /mod_base="OTHER" /note="2'-OMe-nucleotide"
  modified_base 10..10: /mod_base="OTHER" /note="2'-fluoro-nucleotide"
  modified_base 11..11: /mod_base="OTHER" /note="2'-OMe-nucleotide"
  modified_base 12..12: /mod_base="OTHER" /note="2'-fluoro-nucleotide"
  modified_base 13..13: /mod_base="OTHER" /note="2'-OMe-nucleotide"
  modified_base 14..14: /mod_base="OTHER" /note="2'-fluoro-nucleotide"
  modified_base 15..15: /mod_base="OTHER" /note="2'-OMe-nucleotide"
  modified_base 16..16: /mod_base="OTHER" /note="2'-fluoro-nucleotide"
  modified_base 17..17: /mod_base="OTHER" /note="2'-OMe-nucleotide"
  modified_base 18..18: /mod_base="OTHER" /note="2'-fluoro-nucleotide"
  modified_base 19..19: /mod_base="OTHER" /note="2'-OMe-nucleotide"
  modified_base 20..20: /mod_base="OTHER" /note="dT"
  modified_base 21..21: /mod_base="OTHER" /note="dT"
acaguugaaguguccuuuutt

SEQ ID NO: 839 - DNA, 21 bp, Artificial Sequence
  Description of Artificial Sequence: Synthetic oligonucleotide
  Description of Combined DNA/RNA Molecule: Synthetic oligonucleotide
  N-term hydroxyl group
  C-term hydroxyl group
  modified_base 1..1: /mod_base="OTHER" /note="2'-fluoro-nucleotide"
  modified_base 2..2: /mod_base="OTHER" /note="2'-fluoro-nucleotide"
  modified_base 3..3: /mod_base="OTHER" /note="2'-OMe-nucleotide"
  modified_base 4..4: /mod_base="OTHER" /note="2'-fluoro-nucleotide"
  modified_base 5..5: /mod_base="OTHER" /note="2'-OMe-nucleotide"
  modified_base 6..6: /mod_base="OTHER" /note="2'-fluoro-nucleotide"
  modified_base 7..7: /mod_base="OTHER" /note="2'-OMe-nucleotide"
  modified_base 8..8: /mod_base="OTHER" /note="2'-fluoro-nucleotide"
  modified_base 9..9: /mod_base="OTHER" /note="2'-OMe-nucleotide"
  modified_base 10..10: /mod_base="OTHER" /note="2'-fluoro-nucleotide"
  modified_base 11..11: /mod_base="OTHER" /note="2'-OMe-nucleotide"
  modified_base 12..12: /mod_base="OTHER" /note="2'-fluoro-nucleotide"
  modified_base 13..13: /mod_base="OTHER" /note="2'-OMe-nucleotide"
  modified_base 14..14: /mod_base="OTHER" /note="2'-fluoro-nucleotide"
  modified_base 15..15: /mod_base="OTHER" /note="2'-OMe-nucleotide"
  modified_base 16..16: /mod_base="OTHER" /note="2'-fluoro-nucleotide"
  modified_base 17..17: /mod_base="OTHER" /note="2'-OMe-nucleotide"
  modified_base 18..18: /mod_base="OTHER" /note="2'-fluoro-nucleotide"
  modified_base 19..19: /mod_base="OTHER" /note="2'-OMe-nucleotide"
  modified_base 20..20: /mod_base="OTHER" /note="dT"
  modified_base 21..21: /mod_base="OTHER" /note="dT"
gacaguugaaguguccuuutt

SEQ ID NO: 840 - DNA, 21 bp, Artificial Sequence
  Description of Artificial Sequence: Synthetic oligonucleotide
  Description of Combined DNA/RNA Molecule: Synthetic oligonucleotide
  N-term hydroxyl group
  C-term hydroxyl group
  modified_base 1..1: /mod_base="OTHER" /note="2'-fluoro-nucleotide"
  modified_base 2..2: /mod_base="OTHER" /note="2'-fluoro-nucleotide"
  modified_base 3..3: /mod_base="OTHER" /note="2'-OMe-nucleotide"
  modified_base 4..4: /mod_base="OTHER" /note="2'-fluoro-nucleotide"
  modified_base 5..5: /mod_base="OTHER" /note="2'-OMe-nucleotide"
  modified_base 6..6: /mod_base="OTHER" /note="2'-fluoro-nucleotide"
  modified_base 7..7: /mod_base="OTHER" /note="2'-OMe-nucleotide"
  modified_base 8..8: /mod_base="OTHER" /note="2'-fluoro-nucleotide"
  modified_base 9..9: /mod_base="OTHER" /note="2'-OMe-nucleotide"
  modified_base 10..10: /mod_base="OTHER" /note="2'-fluoro-nucleotide"
  modified_base 11..11: /mod_base="OTHER" /note="2'-OMe-nucleotide"
  modified_base 12..12: /mod_base="OTHER" /note="2'-fluoro-nucleotide"
  modified_base 13..13: /mod_base="OTHER" /note="2'-OMe-nucleotide"
  modified_base 14..14: /mod_base="OTHER" /note="2'-fluoro-nucleotide"
  modified_base 15..15: /mod_base="OTHER" /note="2'-OMe-nucleotide"
  modified_base 16..16: /mod_base="OTHER" /note="2'-fluoro-nucleotide"
  modified_base 17..17: /mod_base="OTHER" /note="2'-OMe-nucleotide"
  modified_base 18..18: /mod_base="OTHER" /note="2'-fluoro-nucleotide"
  modified_base 19..19: /mod_base="OTHER" /note="2'-OMe-nucleotide"
  modified_base 20..20: /mod_base="OTHER" /note="dT"
  modified_base 21..21: /mod_base="OTHER" /note="dT"
ggacaguugaaguguccuutt

SEQ ID NO: 841 - DNA, 21 bp, Artificial Sequence
  Description of Artificial Sequence: Synthetic oligonucleotide
  Description of Combined DNA/RNA Molecule: Synthetic oligonucleotide
  N-term hydroxyl group
  C-term hydroxyl group
  modified_base 1..1: /mod_base="OTHER" /note="2'-fluoro-nucleotide"
  modified_base 2..2: /mod_base="OTHER" /note="2'-fluoro-nucleotide"
  modified_base 3..3: /mod_base="OTHER" /note="2'-OMe-nucleotide"
  modified_base 4..4: /mod_base="OTHER" /note="2'-fluoro-nucleotide"
  modified_base 5..5: /mod_base="OTHER" /note="2'-OMe-nucleotide"
  modified_base 6..6: /mod_base="OTHER" /note="2'-fluoro-nucleotide"
  modified_base 7..7: /mod_base="OTHER" /note="2'-OMe-nucleotide"
  modified_base 8..8: /mod_base="OTHER" /note="2'-fluoro-nucleotide"
  modified_base 9..9: /mod_base="OTHER" /note="2'-OMe-nucleotide"
  modified_base 10..10: /mod_base="OTHER" /note="2'-fluoro-nucleotide"
  modified_base 11..11: /mod_base="OTHER" /note="2'-OMe-nucleotide"
  modified_base 12..12: /mod_base="OTHER" /note="2'-fluoro-nucleotide"
  modified_base 13..13: /mod_base="OTHER" /note="2'-OMe-nucleotide"
  modified_base 14..14: /mod_base="OTHER" /note="2'-fluoro-nucleotide"
  modified_base 15..15: /mod_base="OTHER" /note="2'-OMe-nucleotide"
  modified_base 16..16: /mod_base="OTHER" /note="2'-fluoro-nucleotide"
  modified_base 17..17: /mod_base="OTHER" /note="2'-OMe-nucleotide"
  modified_base 18..18: /mod_base="OTHER" /note="2'-fluoro-nucleotide"
  modified_base 19..19: /mod_base="OTHER" /note="2'-OMe-nucleotide"
  modified_base 20..20: /mod_base="OTHER" /note="dT"
  modified_base 21..21: /mod_base="OTHER" /note="dT"
uggacaguugaaguguccutt

SEQ ID NO: 842 - DNA, 21 bp, Artificial Sequence
  Description of Artificial Sequence: Synthetic oligonucleotide
  Description of Combined DNA/RNA Molecule: Synthetic oligonucleotide
  N-term hydroxyl group
  C-term hydroxyl group
  modified_base 1..1: /mod_base="OTHER" /note="2'-fluoro-nucleotide"
  modified_base 2..2: /mod_base="OTHER" /note="2'-fluoro-nucleotide"
  modified_base 3..3: /mod_base="OTHER" /note="2'-OMe-nucleotide"
  modified_base 4..4: /mod_base="OTHER" /note="2'-fluoro-nucleotide"
  modified_base 5..5: /mod_base="OTHER" /note="2'-OMe-nucleotide"
  modified_base 6..6: /mod_base="OTHER" /note="2'-fluoro-nucleotide"
  modified_base 7..7: /mod_base="OTHER" /note="2'-OMe-nucleotide"
  modified_base 8..8: /mod_base="OTHER" /note="2'-fluoro-nucleotide"
  modified_base 9..9: /mod_base="OTHER" /note="2'-OMe-nucleotide"
  modified_base 10..10: /mod_base="OTHER" /note="2'-fluoro-nucleotide"
  modified_base 11..11: /mod_base="OTHER" /note="2'-OMe-nucleotide"
  modified_base 12..12: /mod_base="OTHER" /note="2'-fluoro-nucleotide"
  modified_base 13..13: /mod_base="OTHER" /note="2'-OMe-nucleotide"
  modified_base 14..14: /mod_base="OTHER" /note="2'-fluoro-nucleotide"
  modified_base 15..15: /mod_base="OTHER" /note="2'-OMe-nucleotide"
  modified_base 16..16: /mod_base="OTHER" /note="2'-fluoro-nucleotide"
  modified_base 17..17: /mod_base="OTHER" /note="2'-OMe-nucleotide"
  modified_base 18..18: /mod_base="OTHER" /note="2'-fluoro-nucleotide"
  modified_base 19..19: /mod_base="OTHER" /note="2'-OMe-nucleotide"
  modified_base 20..20: /mod_base="OTHER" /note="dT"
  modified_base 21..21: /mod_base="OTHER" /note="dT"
cuggacaguugaagugucctt

SEQ ID NO: 843 - DNA, 21 bp, Artificial Sequence
  Description of Artificial Sequence: Synthetic oligonucleotide
  Description of Combined DNA/RNA Molecule: Synthetic oligonucleotide
  N-term hydroxyl group
  C-term hydroxyl group
  modified_base 1..1: /mod_base="OTHER" /note="2'-fluoro-nucleotide"
  modified_base 2..2: /mod_base="OTHER" /note="2'-fluoro-nucleotide"
  modified_base 3..3: /mod_base="OTHER" /note="2'-OMe-nucleotide"
  modified_base 4..4: /mod_base="OTHER" /note="2'-fluoro-nucleotide"
  modified_base 5..5: /mod_base="OTHER" /note="2'-OMe-nucleotide"
  modified_base 6..6: /mod_base="OTHER" /note="2'-fluoro-nucleotide"
  modified_base 7..7: /mod_base="OTHER" /note="2'-OMe-nucleotide"
  modified_base 8..8: /mod_base="OTHER" /note="2'-fluoro-nucleotide"
  modified_base 9..9: /mod_base="OTHER" /note="2'-OMe-nucleotide"
  modified_base 10..10: /mod_base="OTHER" /note="2'-fluoro-nucleotide"
  modified_base 11..11: /mod_base="OTHER" /note="2'-OMe-nucleotide"
  modified_base 12..12: /mod_base="OTHER" /note="2'-fluoro-nucleotide"
  modified_base 13..13: /mod_base="OTHER" /note="2'-OMe-nucleotide"
  modified_base 14..14: /mod_base="OTHER" /note="2'-fluoro-nucleotide"
  modified_base 15..15: /mod_base="OTHER" /note="2'-OMe-nucleotide"
  modified_base 16..16: /mod_base="OTHER" /note="2'-fluoro-nucleotide"
  modified_base 17..17: /mod_base="OTHER" /note="2'-OMe-nucleotide"
  modified_base 18..18: /mod_base="OTHER" /note="2'-fluoro-nucleotide"
  modified_base 19..19: /mod_base="OTHER" /note="2'-OMe-nucleotide"
  modified_base 20..20: /mod_base="OTHER" /note="dT"
  modified_base 21..21: /mod_base="OTHER" /note="dT"
ccugaauaacccucuggactt

SEQ ID NO: 844 - DNA, 21 bp, Artificial Sequence
  Description of Artificial Sequence: Synthetic oligonucleotide
  Description of Combined DNA/RNA Molecule: Synthetic oligonucleotide
  N-term hydroxyl group
  C-term hydroxyl group
  modified_base 1..1: /mod_base="OTHER" /note="2'-fluoro-nucleotide"
  modified_base 2..2: /mod_base="OTHER" /note="2'-fluoro-nucleotide"
  modified_base 3..3: /mod_base="OTHER" /note="2'-OMe-nucleotide"
  modified_base 4..4: /mod_base="OTHER" /note="2'-fluoro-nucleotide"
  modified_base 5..5: /mod_base="OTHER" /note="2'-OMe-nucleotide"
  modified_base 6..6: /mod_base="OTHER" /note="2'-fluoro-nucleotide"
  modified_base 7..7: /mod_base="OTHER" /note="2'-OMe-nucleotide"
  modified_base 8..8: /mod_base="OTHER" /note="2'-fluoro-nucleotide"
  modified_base 9..9: /mod_base="OTHER" /note="2'-OMe-nucleotide"
  modified_base 10..10: /mod_base="OTHER" /note="2'-fluoro-nucleotide"
  modified_base 11..11: /mod_base="OTHER" /note="2'-OMe-nucleotide"
  modified_base 12..12: /mod_base="OTHER" /note="2'-fluoro-nucleotide"
  modified_base 13..13: /mod_base="OTHER" /note="2'-OMe-nucleotide"
  modified_base 14..14: /mod_base="OTHER" /note="2'-fluoro-nucleotide"
  modified_base 15..15: /mod_base="OTHER" /note="2'-OMe-nucleotide"
  modified_base 16..16: /mod_base="OTHER" /note="2'-fluoro-nucleotide"
  modified_base 17..17: /mod_base="OTHER" /note="2'-OMe-nucleotide"
  modified_base 18..18: /mod_base="OTHER" /note="2'-fluoro-nucleotide"
  modified_base 19..19: /mod_base="OTHER" /note="2'-OMe-nucleotide"
  modified_base 20..20: /mod_base="OTHER" /note="dT"
  modified_base 21..21: /mod_base="OTHER" /note="dT"
uccugaauaacccucuggatt

SEQ ID NO: 845 - DNA, 21 bp, Artificial Sequence
  Description of Artificial Sequence: Synthetic oligonucleotide
  Description of Combined DNA/RNA Molecule: Synthetic oligonucleotide
  N-term hydroxyl group
  C-term hydroxyl group
  modified_base 1..1: /mod_base="OTHER" /note="2'-fluoro-nucleotide"
  modified_base 2..2: /mod_base="OTHER" /note="2'-fluoro-nucleotide"
  modified_base 3..3: /mod_base="OTHER" /note="2'-OMe-nucleotide"
  modified_base 4..4: /mod_base="OTHER" /note="2'-fluoro-nucleotide"
  modified_base 5..5: /mod_base="OTHER" /note="2'-OMe-nucleotide"
  modified_base 6..6: /mod_base="OTHER" /note="2'-fluoro-nucleotide"
  modified_base 7..7: /mod_base="OTHER" /note="2'-OMe-nucleotide"
  modified_base 8..8: /mod_base="OTHER" /note="2'-fluoro-nucleotide"
  modified_base 9..9: /mod_base="OTHER" /note="2'-OMe-nucleotide"
  modified_base 10..10: /mod_base="OTHER" /note="2'-fluoro-nucleotide"
  modified_base 11..11: /mod_base="OTHER" /note="2'-OMe-nucleotide"
  modified_base 12..12: /mod_base="OTHER" /note="2'-fluoro-nucleotide"
  modified_base 13..13: /mod_base="OTHER" /note="2'-OMe-nucleotide"
  modified_base 14..14: /mod_base="OTHER" /note="2'-fluoro-nucleotide"
  modified_base 15..15: /mod_base="OTHER" /note="2'-OMe-nucleotide"
  modified_base 16..16: /mod_base="OTHER" /note="2'-fluoro-nucleotide"
  modified_base 17..17: /mod_base="OTHER" /note="2'-OMe-nucleotide"
  modified_base 18..18: /mod_base="OTHER" /note="2'-fluoro-nucleotide"
  modified_base 19..19: /mod_base="OTHER" /note="2'-OMe-nucleotide"
  modified_base 20..20: /mod_base="OTHER" /note="dT"
  modified_base 21..21: /mod_base="OTHER" /note="dT"
cuccugaauaacccucuggtt

SEQ ID NO: 846 - DNA, 21 bp, Artificial Sequence
  Description of Artificial Sequence: Synthetic oligonucleotide
  Description of Combined DNA/RNA Molecule: Synthetic oligonucleotide
  N-term hydroxyl group
  C-term hydroxyl group
  modified_base 1..1: /mod_base="OTHER" /note="2'-fluoro-nucleotide"
  modified_base 2..2: /mod_base="OTHER" /note="2'-fluoro-nucleotide"
  modified_base 3..3: /mod_base="OTHER" /note="2'-OMe-nucleotide"
  modified_base 4..4: /mod_base="OTHER" /note="2'-fluoro-nucleotide"
  modified_base 5..5: /mod_base="OTHER" /note="2'-OMe-nucleotide"
  modified_base 6..6: /mod_base="OTHER" /note="2'-fluoro-nucleotide"
  modified_base 7..7: /mod_base="OTHER" /note="2'-OMe-nucleotide"
  modified_base 8..8: /mod_base="OTHER" /note="2'-fluoro-nucleotide"
  modified_base 9..9: /mod_base="OTHER" /note="2'-OMe-nucleotide"
  modified_base 10..10: /mod_base="OTHER" /note="2'-fluoro-nucleotide"
  modified_base 11..11: /mod_base="OTHER" /note="2'-OMe-nucleotide"
  modified_base 12..12: /mod_base="OTHER" /note="2'-fluoro-nucleotide"
  modified_base 13..13: /mod_base="OTHER" /note="2'-OMe-nucleotide"
  modified_base 14..14: /mod_base="OTHER" /note="2'-fluoro-nucleotide"
  modified_base 15..15: /mod_base="OTHER" /note="2'-OMe-nucleotide"
  modified_base 16..16: /mod_base="OTHER" /note="2'-fluoro-nucleotide"
  modified_base 17..17: /mod_base="OTHER" /note="2'-OMe-nucleotide"
  modified_base 18..18: /mod_base="OTHER" /note="2'-fluoro-nucleotide"
  modified_base 19..19: /mod_base="OTHER" /note="2'-OMe-nucleotide"
  modified_base 20..20: /mod_base="OTHER" /note="dT"
  modified_base 21..21: /mod_base="OTHER" /note="dT"
ccuccugaauaacccucugtt

SEQ ID NO: 847 - DNA, 21 bp, Artificial Sequence
  Description of Artificial Sequence: Synthetic oligonucleotide
  Description of Combined DNA/RNA Molecule: Synthetic oligonucleotide
  N-term hydroxyl group
  C-term hydroxyl group
  modified_base 1..1: /mod_base="OTHER" /note="2'-fluoro-nucleotide"
  modified_base 2..2: /mod_base="OTHER" /note="2'-fluoro-nucleotide"
  modified_base 3..3: /mod_base="OTHER" /note="2'-OMe-nucleotide"
  modified_base 4..4: /mod_base="OTHER" /note="2'-fluoro-nucleotide"
  modified_base 5..5: /mod_base="OTHER" /note="2'-OMe-nucleotide"
  modified_base 6..6: /mod_base="OTHER" /note="2'-fluoro-nucleotide"
  modified_base 7..7: /mod_base="OTHER" /note="2'-OMe-nucleotide"
  modified_base 8..8: /mod_base="OTHER" /note="2'-fluoro-nucleotide"
  modified_base 9..9: /mod_base="OTHER" /note="2'-OMe-nucleotide"
  modified_base 10..10: /mod_base="OTHER" /note="2'-fluoro-nucleotide"
  modified_base 11..11: /mod_base="OTHER" /note="2'-OMe-nucleotide"
  modified_base 12..12: /mod_base="OTHER" /note="2'-fluoro-nucleotide"
  modified_base 13..13: /mod_base="OTHER" /note="2'-OMe-nucleotide"
  modified_base 14..14: /mod_base="OTHER" /note="2'-fluoro-nucleotide"
  modified_base 15..15: /mod_base="OTHER" /note="2'-OMe-nucleotide"
  modified_base 16..16: /mod_base="OTHER" /note="2'-fluoro-nucleotide"
  modified_base 17..17: /mod_base="OTHER" /note="2'-OMe-nucleotide"
  modified_base 18..18: /mod_base="OTHER" /note="2'-fluoro-nucleotide"
  modified_base 19..19: /mod_base="OTHER" /note="2'-OMe-nucleotide"
  modified_base 20..20: /mod_base="OTHER" /note="dT"
  modified_base 21..21: /mod_base="OTHER" /note="dT"
gccuccugaauaacccucutt

SEQ ID NO: 848 - DNA, 21 bp, Artificial Sequence
  Description of Artificial Sequence: Synthetic oligonucleotide
  Description of Combined DNA/RNA Molecule: Synthetic oligonucleotide
  N-term hydroxyl group
  C-term hydroxyl group
  modified_base 1..1: /mod_base="OTHER" /note="2'-fluoro-nucleotide"
  modified_base 2..2: /mod_base="OTHER" /note="2'-fluoro-nucleotide"
  modified_base 3..3: /mod_base="OTHER" /note="2'-OMe-nucleotide"
  modified_base 4..4: /mod_base="OTHER" /note="2'-fluoro-nucleotide"
  modified_base 5..5: /mod_base="OTHER" /note="2'-OMe-nucleotide"
  modified_base 6..6: /mod_base="OTHER" /note="2'-fluoro-nucleotide"
  modified_base 7..7: /mod_base="OTHER" /note="2'-OMe-nucleotide"
  modified_base 8..8: /mod_base="OTHER" /note="2'-fluoro-nucleotide"
  modified_base 9..9: /mod_base="OTHER" /note="2'-OMe-nucleotide"
  modified_base 10..10: /mod_base="OTHER" /note="2'-fluoro-nucleotide"
  modified_base 11..11: /mod_base="OTHER" /note="2'-OMe-nucleotide"
  modified_base 12..12: /mod_base="OTHER" /note="2'-fluoro-nucleotide"
  modified_base 13..13: /mod_base="OTHER" /note="2'-OMe-nucleotide"
  modified_base 14..14: /mod_base="OTHER" /note="2'-fluoro-nucleotide"
  modified_base 15..15: /mod_base="OTHER" /note="2'-OMe-nucleotide"
  modified_base 16..16: /mod_base="OTHER" /note="2'-fluoro-nucleotide"
  modified_base 17..17: /mod_base="OTHER" /note="2'-OMe-nucleotide"
  modified_base 18..18: /mod_base="OTHER" /note="2'-fluoro-nucleotide"
  modified_base 19..19: /mod_base="OTHER" /note="2'-OMe-nucleotide"
  modified_base 20..20: /mod_base="OTHER" /note="dT"
  modified_base 21..21: /mod_base="OTHER" /note="dT"
agccuccugaauaacccuctt

SEQ ID NO: 849 - DNA, 21 bp, Artificial Sequence
  Description of Artificial Sequence: Synthetic oligonucleotide
  Description of Combined DNA/RNA Molecule: Synthetic oligonucleotide
  N-term hydroxyl group
  C-term hydroxyl group
  modified_base 1..1: /mod_base="OTHER" /note="2'-fluoro-nucleotide"
  modified_base 2..2: /mod_base="OTHER" /note="2'-fluoro-nucleotide"
  modified_base 3..3: /mod_base="OTHER" /note="2'-OMe-nucleotide"
  modified_base 4..4: /mod_base="OTHER" /note="2'-fluoro-nucleotide"
  modified_base 5..5: /mod_base="OTHER" /note="2'-OMe-nucleotide"
  modified_base 6..6: /mod_base="OTHER" /note="2'-fluoro-nucleotide"
  modified_base 7..7: /mod_base="OTHER" /note="2'-OMe-nucleotide"
  modified_base 8..8: /mod_base="OTHER" /note="2'-fluoro-nucleotide"
  modified_base 9..9: /mod_base="OTHER" /note="2'-OMe-nucleotide"
  modified_base 10..10: /mod_base="OTHER" /note="2'-fluoro-nucleotide"
  modified_base 11..11: /mod_base="OTHER" /note="2'-OMe-nucleotide"
  modified_base 12..12: /mod_base="OTHER" /note="2'-fluoro-nucleotide"
  modified_base 13..13: /mod_base="OTHER" /note="2'-OMe-nucleotide"
  modified_base 14..14: /mod_base="OTHER" /note="2'-fluoro-nucleotide"
  modified_base 15..15: /mod_base="OTHER" /note="2'-OMe-nucleotide"
  modified_base 16..16: /mod_base="OTHER" /note="2'-fluoro-nucleotide"
  modified_base 17..17: /mod_base="OTHER" /note="2'-OMe-nucleotide"
  modified_base 18..18: /mod_base="OTHER" /note="2'-fluoro-nucleotide"
  modified_base 19..19: /mod_base="OTHER" /note="2'-OMe-nucleotide"
  modified_base 20..20: /mod_base="OTHER" /note="dT"
  modified_base 21..21: /mod_base="OTHER" /note="dT"
cagccuccugaauaacccutt

SEQ ID NO: 850 - DNA, 21 bp, Artificial Sequence
  Description of Artificial Sequence: Synthetic oligonucleotide
  Description of Combined DNA/RNA Molecule: Synthetic oligonucleotide
  N-term hydroxyl group
  C-term hydroxyl group
  modified_base 1..1: /mod_base="OTHER" /note="2'-fluoro-nucleotide"
  modified_base 2..2: /mod_base="OTHER" /note="2'-fluoro-nucleotide"
  modified_base 3..3: /mod_base="OTHER" /note="2'-OMe-nucleotide"
  modified_base 4..4: /mod_base="OTHER" /note="2'-fluoro-nucleotide"
  modified_base 5..5: /mod_base="OTHER" /note="2'-OMe-nucleotide"
  modified_base 6..6: /mod_base="OTHER" /note="2'-fluoro-nucleotide"
  modified_base 7..7: /mod_base="OTHER" /note="2'-OMe-nucleotide"
  modified_base 8..8: /mod_base="OTHER" /note="2'-fluoro-nucleotide"
  modified_base 9..9: /mod_base="OTHER" /note="2'-OMe-nucleotide"
  modified_base 10..10: /mod_base="OTHER" /note="2'-fluoro-nucleotide"
  modified_base 11..11: /mod_base="OTHER" /note="2'-OMe-nucleotide"
  modified_base 12..12: /mod_base="OTHER" /note="2'-fluoro-nucleotide"
  modified_base 13..13: /mod_base="OTHER" /note="2'-OMe-nucleotide"
  modified_base 14..14: /mod_base="OTHER" /note="2'-fluoro-nucleotide"
  modified_base 15..15: /mod_base="OTHER" /note="2'-OMe-nucleotide"
  modified_base 16..16: /mod_base="OTHER" /note="2'-fluoro-nucleotide"
  modified_base 17..17: /mod_base="OTHER" /note="2'-OMe-nucleotide"
  modified_base 18..18: /mod_base="OTHER" /note="2'-fluoro-nucleotide"
  modified_base 19..19: /mod_base="OTHER" /note="2'-OMe-nucleotide"
  modified_base 20..20: /mod_base="OTHER" /note="dT"
  modified_base 21..21: /mod_base="OTHER" /note="dT"
accagccuccugaauaacctt

SEQ ID NO: 851 - DNA, 21 bp, Artificial Sequence
  Description of Artificial Sequence: Synthetic oligonucleotide
  Description of Combined DNA/RNA Molecule: Synthetic oligonucleotide
  N-term hydroxyl group
  C-term hydroxyl group
  modified_base 1..1: /mod_base="OTHER" /note="2'-fluoro-nucleotide"
  modified_base 2..2: /mod_base="OTHER" /note="2'-fluoro-nucleotide"
  modified_base 3..3: /mod_base="OTHER" /note="2'-OMe-nucleotide"
  modified_base 4..4: /mod_base="OTHER" /note="2'-fluoro-nucleotide"
  modified_base 5..5: /mod_base="OTHER" /note="2'-OMe-nucleotide"
  modified_base 6..6: /mod_base="OTHER" /note="2'-fluoro-nucleotide"
  modified_base 7..7: /mod_base="OTHER" /note="2'-OMe-nucleotide"
  modified_base 8..8: /mod_base="OTHER" /note="2'-fluoro-nucleotide"
  modified_base 9..9: /mod_base="OTHER" /note="2'-OMe-nucleotide"
  modified_base 10..10: /mod_base="OTHER" /note="2'-fluoro-nucleotide"
  modified_base 11..11: /mod_base="OTHER" /note="2'-OMe-nucleotide"
  modified_base 12..12: /mod_base="OTHER" /note="2'-fluoro-nucleotide"
  modified_base 13..13: /mod_base="OTHER" /note="2'-OMe-nucleotide"
  modified_base 14..14: /mod_base="OTHER" /note="2'-fluoro-nucleotide"
  modified_base 15..15: /mod_base="OTHER" /note="2'-OMe-nucleotide"
  modified_base 16..16: /mod_base="OTHER" /note="2'-fluoro-nucleotide"
  modified_base 17..17: /mod_base="OTHER" /note="2'-OMe-nucleotide"
  modified_base 18..18: /mod_base="OTHER" /note="2'-fluoro-nucleotide"
  modified_base 19..19: /mod_base="OTHER" /note="2'-OMe-nucleotide"
  modified_base 20..20: /mod_base="OTHER" /note="dT"
  modified_base 21..21: /mod_base="OTHER" /note="dT"
cuuccaagauaauccucuutt

SEQ ID NO: 852 - DNA, 21 bp, Artificial Sequence
  Description of Artificial Sequence: Synthetic oligonucleotide
  Description of Combined DNA/RNA Molecule: Synthetic oligonucleotide
  N-term hydroxyl group
  C-term hydroxyl group
  modified_base 1..1: /mod_base="OTHER" /note="2'-fluoro-nucleotide"
  modified_base 2..2: /mod_base="OTHER" /note="2'-fluoro-nucleotide"
  modified_base 3..3: /mod_base="OTHER" /note="2'-OMe-nucleotide"
  modified_base 4..4: /mod_base="OTHER" /note="2'-fluoro-nucleotide"
  modified_base 5..5: /mod_base="OTHER" /note="2'-OMe-nucleotide"
  modified_base 6..6: /mod_base="OTHER" /note="2'-fluoro-nucleotide"
  modified_base 7..7: /mod_base="OTHER" /note="2'-OMe-nucleotide"
  modified_base 8..8: /mod_base="OTHER" /note="2'-fluoro-nucleotide"
  modified_base 9..9: /mod_base="OTHER" /note="2'-OMe-nucleotide"
  modified_base 10..10: /mod_base="OTHER" /note="2'-fluoro-nucleotide"
  modified_base 11..11: /mod_base="OTHER" /note="2'-OMe-nucleotide"
  modified_base 12..12: /mod_base="OTHER" /note="2'-fluoro-nucleotide"
  modified_base 13..13: /mod_base="OTHER" /note="2'-OMe-nucleotide"
  modified_base 14..14: /mod_base="OTHER" /note="2'-fluoro-nucleotide"
  modified_base 15..15: /mod_base="OTHER" /note="2'-OMe-nucleotide"
  modified_base 16..16: /mod_base="OTHER" /note="2'-fluoro-nucleotide"
  modified_base 17..17: /mod_base="OTHER" /note="2'-OMe-nucleotide"
  modified_base 18..18: /mod_base="OTHER" /note="2'-fluoro-nucleotide"
  modified_base 19..19: /mod_base="OTHER" /note="2'-OMe-nucleotide"
  modified_base 20..20: /mod_base="OTHER" /note="dT"
  modified_base 21..21: /mod_base="OTHER" /note="dT"
acuuccaagauaauccucutt

SEQ ID NO: 853 - DNA, 21 bp, Artificial Sequence
  Description of Artificial Sequence: Synthetic oligonucleotide
  Description of Combined DNA/RNA Molecule: Synthetic oligonucleotide
  N-term hydroxyl group
  C-term hydroxyl group
  modified_base 1..1: /mod_base="OTHER" /note="2'-fluoro-nucleotide"
  modified_base 2..2: /mod_base="OTHER" /note="2'-fluoro-nucleotide"
  modified_base 3..3: /mod_base="OTHER" /note="2'-OMe-nucleotide"
  modified_base 4..4: /mod_base="OTHER" /note="2'-fluoro-nucleotide"
  modified_base 5..5: /mod_base="OTHER" /note="2'-OMe-nucleotide"
  modified_base 6..6: /mod_base="OTHER" /note="2'-fluoro-nucleotide"
  modified_base 7..7: /mod_base="OTHER" /note="2'-OMe-nucleotide"
  modified_base 8..8: /mod_base="OTHER" /note="2'-fluoro-nucleotide"
  modified_base 9..9: /mod_base="OTHER" /note="2'-OMe-nucleotide"
  modified_base 10..10: /mod_base="OTHER" /note="2'-fluoro-nucleotide"
  modified_base 11..11: /mod_base="OTHER" /note="2'-OMe-nucleotide"
  modified_base 12..12: /mod_base="OTHER" /note="2'-fluoro-nucleotide"
  modified_base 13..13: /mod_base="OTHER" /note="2'-OMe-nucleotide"
  modified_base 14..14: /mod_base="OTHER" /note="2'-fluoro-nucleotide"
  modified_base 15..15: /mod_base="OTHER" /note="2'-OMe-nucleotide"
  modified_base 16..16: /mod_base="OTHER" /note="2'-fluoro-nucleotide"
  modified_base 17..17: /mod_base="OTHER" /note="2'-OMe-nucleotide"
  modified_base 18..18: /mod_base="OTHER" /note="2'-fluoro-nucleotide"
  modified_base 19..19: /mod_base="OTHER" /note="2'-OMe-nucleotide"
  modified_base 20..20: /mod_base="OTHER" /note="dT"
  modified_base 21..21: /mod_base="OTHER" /note="dT"
gacuuccaagauaauccuctt

SEQ ID NO: 854 - DNA, 23 bp, Artificial Sequence
  Description of Artificial Sequence: Synthetic oligonucleotide
  Description of Combined DNA/RNA Molecule: Synthetic oligonucleotide
  N-term hydroxyl group
  C-term hydroxyl group
  modified_base 1..1: /mod_base="OTHER" /note="2'-OMe-nucleotide"
  modified_base 2..2: /mod_base="OTHER" /note="2'-fluoro-nucleotide"
  modified_base 3..3: /mod_base="OTHER" /note="2'-OMe-nucleotide"
  modified_base 4..4: /mod_base="OTHER" /note="2'-fluoro-nucleotide"
  modified_base 5..5: /mod_base="OTHER" /note="2'-OMe-nucleotide"
  modified_base 6..6: /mod_base="OTHER" /note="2'-fluoro-nucleotide"
  modified_base 7..7: /mod_base="OTHER" /note="2'-OMe-nucleotide"
  modified_base 8..8: /mod_base="OTHER" /note="2'-fluoro-nucleotide"
  modified_base 9..9: /mod_base="OTHER" /note="2'-OMe-nucleotide"
  modified_base 10..10: /mod_base="OTHER" /note="2'-fluoro-nucleotide"
  modified_base 11..11: /mod_base="OTHER" /note="2'-OMe-nucleotide"
  modified_base 12..12: /mod_base="OTHER" /note="2'-fluoro-nucleotide"
  modified_base 13..13: /mod_base="OTHER" /note="2'-OMe-nucleotide"
  modified_base 14..14: /mod_base="OTHER" /note="2'-fluoro-nucleotide"
  modified_base 15..15: /mod_base="OTHER" /note="2'-OMe-nucleotide"
  modified_base 16..16: /mod_base="OTHER" /note="2'-fluoro-nucleotide"
  modified_base 17..17: /mod_base="OTHER" /note="2'-OMe-nucleotide"
  modified_base 18..18: /mod_base="OTHER" /note="2'-fluoro-nucleotide"
  modified_base 19..19: /mod_base="OTHER" /note="2'-OMe-nucleotide"
  modified_base 20..20: /mod_base="OTHER" /note="2'-fluoro-nucleotide"
  modified_base 21..21: /mod_base="OTHER" /note="2'-OMe-nucleotide"
  modified_base 22..22: /mod_base="OTHER" /note="dT"
  modified_base 23..23: /mod_base="OTHER" /note="dT"
gaaucaaaugaugaauugucutt

SEQ ID NO: 855 - DNA, 24 bp, Artificial Sequence
  Description of Artificial Sequence: Synthetic oligonucleotide
  Description of Combined DNA/RNA Molecule: Synthetic oligonucleotide
  N-term hydroxyl group
  C-term hydroxyl group
  modified_base 1..1: /mod_base="OTHER" /note="2'-OMe-nucleotide"
  modified_base 2..2: /mod_base="OTHER" /note="2'-OMe-nucleotide"
  modified_base 3..3: /mod_base="OTHER" /note="2'-OMe-nucleotide"
  modified_base 4..4: /mod_base="OTHER" /note="2'-fluoro-nucleotide"
  modified_base 5..5: /mod_base="OTHER" /note="2'-OMe-nucleotide"
  modified_base 6..6: /mod_base="OTHER" /note="2'-fluoro-nucleotide"
  modified_base 7..7: /mod_base="OTHER" /note="2'-OMe-nucleotide"
  modified_base 8..8: /mod_base="OTHER" /note="2'-fluoro-nucleotide"
  modified_base 9..9: /mod_base="OTHER" /note="2'-OMe-nucleotide"
  modified_base 10..10: /mod_base="OTHER" /note="2'-fluoro-nucleotide"
  modified_base 11..11: /mod_base="OTHER" /note="2'-OMe-nucleotide"
  modified_base 12..12: /mod_base="OTHER" /note="2'-fluoro-nucleotide"
  modified_base 13..13: /mod_base="OTHER" /note="2'-OMe-nucleotide"
  modified_base 14..14: /mod_base="OTHER" /note="2'-fluoro-nucleotide"
  modified_base 15..15: /mod_base="OTHER" /note="2'-OMe-nucleotide"
  modified_base 16..16: /mod_base="OTHER" /note="2'-fluoro-nucleotide"
  modified_base 17..17: /mod_base="OTHER" /note="2'-OMe-nucleotide"
  modified_base 18..18: /mod_base="OTHER" /note="2'-fluoro-nucleotide"
  modified_base 19..19: /mod_base="OTHER" /note="2'-OMe-nucleotide"
  modified_base 20..20: /mod_base="OTHER" /note="2'-fluoro-nucleotide"
  modified_base 21..21: /mod_base="OTHER" /note="2'-OMe-nucleotide"
  modified_base 22..22: /mod_base="OTHER" /note="2'-fluoro-nucleotide"
  modified_base 23..23: /mod_base="OTHER" /note="2'-OMe-nucleotide"
  modified_base 24..24: /mod_base="OTHER" /note="Inverted nucleotide"
ccagacaauucaucauuugauuct

SEQ ID NO: 856 - DNA, 22 bp, Artificial Sequence
  Description of Artificial Sequence: Synthetic oligonucleotide
  Description of Combined DNA/RNA Molecule: Synthetic oligonucleotide
  N-term hydroxyl group
  C-term hydroxyl group
  modified_base 1..1: /mod_base="OTHER" /note="2'-fluoro-nucleotide"
  modified_base 2..2: /mod_base="OTHER" /note="2'-OMe-nucleotide"
  modified_base 3..3: /mod_base="OTHER" /note="2'-fluoro-nucleotide"
  modified_base 4..4: /mod_base="OTHER" /note="2'-OMe-nucleotide"
  modified_base 5..5: /mod_base="OTHER" /note="2'-fluoro-nucleotide"
  modified_base 6..6: /mod_base="OTHER" /note="2'-OMe-nucleotide"
  modified_base 7..7: /mod_base="OTHER" /note="2'-fluoro-nucleotide"
  modified_base 8..8: /mod_base="OTHER" /note="2'-OMe-nucleotide"
  modified_base 9..9: /mod_base="OTHER" /note="2'-fluoro-nucleotide"
  modified_base 10..10: /mod_base="OTHER" /note="2'-OMe-nucleotide"
  modified_base 11..11: /mod_base="OTHER" /note="2'-fluoro-nucleotide"
  modified_base 12..12: /mod_base="OTHER" /note="2'-OMe-nucleotide"
  modified_base 13..13: /mod_base="OTHER" /note="2'-fluoro-nucleotide"
  modified_base 14..14: /mod_base="OTHER" /note="2'-OMe-nucleotide"
  modified_base 15..15: /mod_base="OTHER" /note="2'-fluoro-nucleotide"
  modified_base 16..16: /mod_base="OTHER" /note="2'-OMe-nucleotide"
  modified_base 17..17: /mod_base="OTHER" /note="2'-fluoro-nucleotide"
  modified_base 18..18: /mod_base="OTHER" /note="2'-OMe-nucleotide"
  modified_base 19..19: /mod_base="OTHER" /note="2'-fluoro-nucleotide"
  modified_base 20..20: /mod_base="OTHER" /note="2'-OMe-nucleotide"
  modified_base 21..21: /mod_base="OTHER" /note="dT"
  modified_base 22..22: /mod_base="OTHER" /note="dT"
gaaucaaaugaugaauuguctt

SEQ ID NO: 857 - DNA, 22 bp, Artificial Sequence
  Description of Artificial Sequence: Synthetic oligonucleotide
  Description of Combined DNA/RNA Molecule: Synthetic oligonucleotide
  N-term hydroxyl group
  C-term hydroxyl group
  modified_base 1..1: /mod_base="OTHER" /note="GalNAc-morpholino-thymidine analog 7"
  modified_base 2..2: /mod_base="OTHER" /note="GalNAc-morpholino-thymidine analog 7"
  modified_base 3..3: /mod_base="OTHER" /note="GalNAc-morpholino-thymidine analog 7"
  modified_base 4..4: /mod_base="OTHER" /note="2'-OMe-nucleotide"
  modified_base 5..5: /mod_base="OTHER" /note="2'-OMe-nucleotide"
  modified_base 6..6: /mod_base="OTHER" /note="2'-OMe-nucleotide"
  modified_base 7..7: /mod_base="OTHER" /note="2'-OMe-nucleotide"
  modified_base 8..8: /mod_base="OTHER" /note="2'-fluoro-nucleotide"
  modified_base 9..9: /mod_base="OTHER" /note="2'-OMe-nucleotide"
  modified_base 10..10: /mod_base="OTHER" /note="2'-fluoro-nucleotide"
  modified_base 11..11: /mod_base="OTHER" /note="2'-fluoro-nucleotide"
  modified_base 12..12: /mod_base="OTHER" /note="2'-fluoro-nucleotide"
  modified_base 13..13: /mod_base="OTHER" /note="2'-OMe-nucleotide"
  modified_base 14..14: /mod_base="OTHER" /note="2'-OMe-nucleotide"
  modified_base 15..15: /mod_base="OTHER" /note="2'-OMe-nucleotide"
  modified_base 16..16: /mod_base="OTHER" /note="2'-OMe-nucleotide"
  modified_base 17..17: /mod_base="OTHER" /note="2'-OMe-nucleotide"
  modified_base 18..18: /mod_base="OTHER" /note="2'-OMe-nucleotide"
  modified_base 19..19: /mod_base="OTHER" /note="2'-OMe-nucleotide"
  modified_base 20..20: /mod_base="OTHER" /note="2'-OMe-nucleotide"
  misc_feature 20..21: /note="phosphorothioate bond"
  modified_base 21..21: /mod_base="OTHER" /note="2'-OMe-nucleotide"
  misc_feature 21..22: /note="phosphorothioate bond"
  modified_base 22..22: /mod_base="OTHER" /note="2'-OMe-nucleotide"
tttagacaauucaucauuugau

SEQ ID NO: 858 - DNA, 22 bp, Artificial Sequence
  Description of Artificial Sequence: Synthetic oligonucleotide
  Description of Combined DNA/RNA Molecule: Synthetic oligonucleotide
  N-term hydroxyl group
  C-term hydroxyl group
  modified_base 1..1: /mod_base="OTHER" /note="GalNAc-morpholino-thymidine analog 7"
  modified_base 2..2: /mod_base="OTHER" /note="GalNAc-morpholino-thymidine analog 7"
  modified_base 3..3: /mod_base="OTHER" /note="GalNAc-morpholino-thymidine analog 7"
  modified_base 4..4: /mod_base="OTHER" /note="2'-OMe-nucleotide"
  modified_base 5..5: /mod_base="OTHER" /note="2'-OMe-nucleotide"
  modified_base 6..6: /mod_base="OTHER" /note="2'-OMe-nucleotide"
  modified_base 7..7: /mod_base="OTHER" /note="2'-OMe-nucleotide"
  modified_base 8..8: /mod_base="OTHER" /note="2'-fluoro-nucleotide"
  modified_base 9..9: /mod_base="OTHER" /note="2'-OMe-nucleotide"
  modified_base 10..10: /mod_base="OTHER" /note="2'-fluoro-nucleotide"
  modified_base 11..11: /mod_base="OTHER" /note="2'-fluoro-nucleotide"
  modified_base 12..12: /mod_base="OTHER" /note="2'-fluoro-nucleotide"
  modified_base 13..13: /mod_base="OTHER" /note="2'-OMe-nucleotide"
  modified_base 14..14: /mod_base="OTHER" /note="2'-OMe-nucleotide"
  modified_base 15..15: /mod_base="OTHER" /note="2'-OMe-nucleotide"
  modified_base 16..16: /mod_base="OTHER" /note="2'-OMe-nucleotide"
  modified_base 17..17: /mod_base="OTHER" /note="2'-OMe-nucleotide"
  modified_base 18..18: /mod_base="OTHER" /note="2'-OMe-nucleotide"
  modified_base 19..19: /mod_base="OTHER" /note="2'-OMe-nucleotide"
  modified_base 20..20: /mod_base="OTHER" /note="2'-OMe-nucleotide"
  misc_feature 20..21: /note="phosphorothioate bond"
  modified_base 21..21: /mod_base="OTHER" /note="2'-OMe-nucleotide"
  misc_feature 21..22: /note="phosphorothioate bond"
  modified_base 22..22: /mod_base="OTHER" /note="2'-OMe-nucleotide"
tttagacaauucaucauuugau

SEQ ID NO: 859 - DNA, 22 bp, Artificial Sequence
  Description of Artificial Sequence: Synthetic oligonucleotide
  Description of Combined DNA/RNA Molecule: Synthetic oligonucleotide
  N-term hydroxyl group
  C-term hydroxyl group
  modified_base 1..1: /mod_base="OTHER" /note="GalNAc-morpholino-thymidine analog 7"
  modified_base 2..2: /mod_base="OTHER" /note="GalNAc-morpholino-thymidine analog 7"
  modified_base 3..3: /mod_base="OTHER" /note="GalNAc-morpholino-thymidine analog 7"
  modified_base 4..4: /mod_base="OTHER" /note="2'-OMe-nucleotide"
  modified_base 5..5: /mod_base="OTHER" /note="2'-OMe-nucleotide"
  modified_base 6..6: /mod_base="OTHER" /note="2'-OMe-nucleotide"
  modified_base 7..7: /mod_base="OTHER" /note="2'-OMe-nucleotide"
  modified_base 8..8: /mod_base="OTHER" /note="2'-fluoro-nucleotide"
  modified_base 9..9: /mod_base="OTHER" /note="2'-OMe-nucleotide"
  modified_base 10..10: /mod_base="OTHER" /note="2'-fluoro-nucleotide"
  modified_base 11..11: /mod_base="OTHER" /note="2'-fluoro-nucleotide"
  modified_base 12..12: /mod_base="OTHER" /note="2'-fluoro-nucleotide"
  modified_base 13..13: /mod_base="OTHER" /note="2'-OMe-nucleotide"
  modified_base 14..14: /mod_base="OTHER" /note="2'-OMe-nucleotide"
  modified_base 15..15: /mod_base="OTHER" /note="2'-OMe-nucleotide"
  modified_base 16..16: /mod_base="OTHER" /note="2'-OMe-nucleotide"
  modified_base 17..17: /mod_base="OTHER" /note="2'-OMe-nucleotide"
  modified_base 18..18: /mod_base="OTHER" /note="2'-OMe-nucleotide"
  modified_base 19..19: /mod_base="OTHER" /note="2'-OMe-nucleotide"
  modified_base 20..20: /mod_base="OTHER" /note="2'-OMe-nucleotide"
  misc_feature 20..21: /note="phosphorothioate bond"
  modified_base 21..21: /mod_base="OTHER" /note="2'-OMe-nucleotide"
  misc_feature 21..22: /note="phosphorothioate bond"
  modified_base 22..22: /mod_base="OTHER" /note="2'-OMe-nucleotide"
tttagacaauucaucauuugau

SEQ ID NO: 860 - DNA, 22 bp, Artificial Sequence
  Description of Artificial Sequence: Synthetic oligonucleotide
  Description of Combined DNA/RNA Molecule: Synthetic oligonucleotide
  N-term hydroxyl group
  C-term hydroxyl group
  modified_base 1..1: /mod_base="OTHER" /note="GalNAc-morpholino-thymidine analog 7"
  modified_base 2..2: /mod_base="OTHER" /note="GalNAc-morpholino-thymidine analog 7"
  modified_base 3..3: /mod_base="OTHER" /note="GalNAc-morpholino-thymidine analog 7"
  modified_base 4..4: /mod_base="OTHER" /note="2'-OMe-nucleotide"
  modified_base 5..5: /mod_base="OTHER" /note="2'-OMe-nucleotide"
  modified_base 6..6: /mod_base="OTHER" /note="2'-OMe-nucleotide"
  modified_base 7..7: /mod_base="OTHER" /note="2'-OMe-nucleotide"
  modified_base 8..8: /mod_base="OTHER" /note="2'-fluoro-nucleotide"
  modified_base 9..9: /mod_base="OTHER" /note="2'-OMe-nucleotide"
  modified_base 10..10: /mod_base="OTHER" /note="2'-fluoro-nucleotide"
  modified_base 11..11: /mod_base="OTHER" /note="2'-fluoro-nucleotide"
  modified_base 12..12: /mod_base="OTHER" /note="2'-fluoro-nucleotide"
  modified_base 13..13: /mod_base="OTHER" /note="2'-OMe-nucleotide"
  modified_base 14..14: /mod_base="OTHER" /note="2'-OMe-nucleotide"
  modified_base 15..15: /mod_base="OTHER" /note="2'-OMe-nucleotide"
  modified_base 16..16: /mod_base="OTHER" /note="2'-OMe-nucleotide"
  modified_base 17..17: /mod_base="OTHER" /note="2'-OMe-nucleotide"
  modified_base 18..18: /mod_base="OTHER" /note="2'-OMe-nucleotide"
  modified_base 19..19: /mod_base="OTHER" /note="2'-OMe-nucleotide"
  modified_base 20..20: /mod_base="OTHER" /note="2'-OMe-nucleotide"
  misc_feature 20..21: /note="phosphorothioate bond"
  modified_base 21..21: /mod_base="OTHER" /note="2'-OMe-nucleotide"
  misc_feature 21..22: /note="phosphorothioate bond"
  modified_base 22..22: /mod_base="OTHER" /note="2'-OMe-nucleotide"
tttagacaauucaucauuugau

SEQ ID NO: 861 - DNA, 22 bp, Artificial Sequence
  Description of Artificial Sequence: Synthetic oligonucleotide
  Description of Combined DNA/RNA Molecule: Synthetic oligonucleotide
  N-term hydroxyl group
  C-term hydroxyl group
  modified_base 1..1: /mod_base="OTHER" /note="GalNAc-morpholino-thymidine analog 7"
  modified_base 2..2: /mod_base="OTHER" /note="GalNAc-morpholino-thymidine analog 7"
  modified_base 3..3: /mod_base="OTHER" /note="GalNAc-morpholino-thymidine analog 7"
  modified_base 4..4: /mod_base="OTHER" /note="Locked nucleic acid (LNA) nucleotide"
  modified_base 5..5: /mod_base="OTHER" /note="Locked nucleic acid (LNA) nucleotide"
  modified_base 6..6: /mod_base="OTHER" /note="2'-OMe-nucleotide"
  modified_base 7..7: /mod_base="OTHER" /note="2'-OMe-nucleotide"
  modified_base 8..8: /mod_base="OTHER" /note="2'-fluoro-nucleotide"
  modified_base 9..9: /mod_base="OTHER" /note="2'-OMe-nucleotide"
  modified_base 10..10: /mod_base="OTHER" /note="2'-fluoro-nucleotide"
  modified_base 11..11: /mod_base="OTHER" /note="2'-fluoro-nucleotide"
  modified_base 12..12: /mod_base="OTHER" /note="2'-fluoro-nucleotide"
  modified_base 13..13: /mod_base="OTHER" /note="2'-OMe-nucleotide"
  modified_base 14..14: /mod_base="OTHER" /note="2'-OMe-nucleotide"
  modified_base 15..15: /mod_base="OTHER" /note="2'-OMe-nucleotide"
  modified_base 16..16: /mod_base="OTHER" /note="2'-OMe-nucleotide"
  modified_base 17..17: /mod_base="OTHER" /note="2'-OMe-nucleotide"
  modified_base 18..18: /mod_base="OTHER" /note="2'-OMe-nucleotide"
  modified_base 19..19: /mod_base="OTHER" /note="2'-OMe-nucleotide"
  modified_base 20..20: /mod_base="OTHER" /note="2'-OMe-nucleotide"
  misc_feature 20..21: /note="phosphorothioate bond"
  modified_base 21..21: /mod_base="OTHER" /note="2'-OMe-nucleotide"
  misc_feature 21..22: /note="phosphorothioate bond"
  modified_base 22..22: /mod_base="OTHER" /note="2'-OMe-nucleotide"
tttagacaauucaucauuugau

SEQ ID NO: 862 - DNA, 22 bp, Artificial Sequence
  Description of Artificial Sequence: Synthetic oligonucleotide
  Description of Combined DNA/RNA Molecule: Synthetic oligonucleotide
  N-term hydroxyl group
  C-term hydroxyl group
  modified_base 1..1: /mod_base="OTHER" /note="GalNAc-morpholino-thymidine analog 7"
  modified_base 2..2: /mod_base="OTHER" /note="GalNAc-morpholino-thymidine analog 7"
  modified_base 3..3: /mod_base="OTHER" /note="GalNAc-morpholino-thymidine analog 7"
  modified_base 4..4: /mod_base="OTHER" /note="Locked nucleic acid (LNA) nucleotide"
  modified_base 5..5: /mod_base="OTHER" /note="Locked nucleic acid (LNA) nucleotide"
  modified_base 6..6: /mod_base="OTHER" /note="2'-OMe-nucleotide"
  modified_base 7..7: /mod_base="OTHER" /note="2'-OMe-nucleotide"
  modified_base 8..8: /mod_base="OTHER" /note="2'-fluoro-nucleotide"
  modified_base 9..9: /mod_base="OTHER" /note="2'-OMe-nucleotide"
  modified_base 10..10: /mod_base="OTHER" /note="2'-fluoro-nucleotide"
  modified_base 11..11: /mod_base="OTHER" /note="2'-fluoro-nucleotide"
  modified_base 12..12: /mod_base="OTHER" /note="2'-fluoro-nucleotide"
  modified_base 13..13: /mod_base="OTHER" /note="2'-OMe-nucleotide"
  modified_base 14..14: /mod_base="OTHER" /note="2'-OMe-nucleotide"
  modified_base 15..15: /mod_base="OTHER" /note="2'-OMe-nucleotide"
  modified_base 16..16: /mod_base="OTHER" /note="2'-OMe-nucleotide"
  modified_base 17..17: /mod_base="OTHER" /note="2'-OMe-nucleotide"
  modified_base 18..18: /mod_base="OTHER" /note="2'-OMe-nucleotide"
  modified_base 19..19: /mod_base="OTHER" /note="2'-OMe-nucleotide"
  modified_base 20..20: /mod_base="OTHER" /note="2'-OMe-nucleotide"
  misc_feature 20..21: /note="phosphorothioate bond"
  modified_base 21..21: /mod_base="OTHER" /note="2'-OMe-nucleotide"
  misc_feature 21..22: /note="phosphorothioate bond"
  modified_base 22..22: /mod_base="OTHER" /note="2'-OMe-nucleotide"
tttagacaauucaucauuugau

SEQ ID NO: 863 - DNA, 22 bp, Artificial Sequence
  Description of Artificial Sequence: Synthetic oligonucleotide
  Description of Combined DNA/RNA Molecule: Synthetic oligonucleotide
  N-term hydroxyl group
  C-term hydroxyl group
  modified_base 1..1: /mod_base="OTHER" /note="GalNAc-morpholino-thymidine analog 7"
  modified_base 2..2: /mod_base="OTHER" /note="GalNAc-morpholino-thymidine analog 7"
  modified_base 3..3: /mod_base="OTHER" /note="GalNAc-morpholino-thymidine analog 7"
  modified_base 4..4: /mod_base="OTHER" /note="Locked nucleic acid (LNA) nucleotide"
  modified_base 5..5: /mod_base="OTHER" /note="Locked nucleic acid (LNA) nucleotide"
  modified_base 6..6: /mod_base="OTHER" /note="2'-OMe-nucleotide"
  modified_base 7..7: /mod_base="OTHER" /note="2'-OMe-nucleotide"
  modified_base 8..8: /mod_base="OTHER" /note="2'-fluoro-nucleotide"
  modified_base 9..9: /mod_base="OTHER" /note="2'-OMe-nucleotide"
  modified_base 10..10: /mod_base="OTHER" /note="2'-fluoro-nucleotide"
  modified_base 11..11: /mod_base="OTHER" /note="2'-fluoro-nucleotide"
  modified_base 12..12: /mod_base="OTHER" /note="2'-fluoro-nucleotide"
  modified_base 13..13: /mod_base="OTHER" /note="2'-OMe-nucleotide"
  modified_base 14..14: /mod_base="OTHER" /note="2'-OMe-nucleotide"
  modified_base 15..15: /mod_base="OTHER" /note="2'-OMe-nucleotide"
  modified_base 16..16: /mod_base="OTHER" /note="2'-OMe-nucleotide"
  modified_base 17..17: /mod_base="OTHER" /note="2'-OMe-nucleotide"
  modified_base 18..18: /mod_base="OTHER" /note="2'-OMe-nucleotide"
  modified_base 19..19: /mod_base="OTHER" /note="2'-OMe-nucleotide"
  modified_base 20..20: /mod_base="OTHER" /note="2'-OMe-nucleotide"
  misc_feature 20..21: /note="phosphorothioate bond"
  modified_base 21..21: /mod_base="OTHER" /note="2'-OMe-nucleotide"
  misc_feature 21..22: /note="phosphorothioate bond"
  modified_base 22..22: /mod_base="OTHER" /note="2'-OMe-nucleotide"
tttagacaauucaucauuugau

SEQ ID NO: 864 - DNA, 22 bp, Artificial Sequence
  Description of Artificial Sequence: Synthetic oligonucleotide
  Description of Combined DNA/RNA Molecule: Synthetic oligonucleotide
  N-term hydroxyl group
  C-term hydroxyl group
  modified_base 1..1: /mod_base="OTHER" /note="GalNAc-morpholino-thymidine analog 7"
  modified_base 2..2: /mod_base="OTHER" /note="GalNAc-morpholino-thymidine analog 7"
  modified_base 3..3: /mod_base="OTHER" /note="GalNAc-morpholino-thymidine analog 7"
  modified_base 4..4: /mod_base="OTHER" /note="Locked nucleic acid (LNA) nucleotide"
  modified_base 5..5: /mod_base="OTHER" /note="Locked nucleic acid (LNA) nucleotide"
  modified_base 6..6: /mod_base="OTHER" /note="2'-OMe-nucleotide"
  modified_base 7..7: /mod_base="OTHER" /note="2'-OMe-nucleotide"
  modified_base 8..8: /mod_base="OTHER" /note="2'-fluoro-nucleotide"
  modified_base 9..9: /mod_base="OTHER" /note="2'-OMe-nucleotide"
  modified_base 10..10: /mod_base="OTHER" /note="2'-fluoro-nucleotide"
  modified_base 11..11: /mod_base="OTHER" /note="2'-fluoro-nucleotide"
  modified_base 12..12: /mod_base="OTHER" /note="2'-fluoro-nucleotide"
  modified_base 13..13: /mod_base="OTHER" /note="2'-OMe-nucleotide"
  modified_base 14..14: /mod_base="OTHER" /note="2'-OMe-nucleotide"
  modified_base 15..15: /mod_base="OTHER" /note="2'-OMe-nucleotide"
  modified_base 16..16: /mod_base="OTHER" /note="2'-OMe-nucleotide"
  modified_base 17..17: /mod_base="OTHER" /note="2'-OMe-nucleotide"
  modified_base 18..18: /mod_base="OTHER" /note="2'-OMe-nucleotide"
  modified_base 19..19: /mod_base="OTHER" /note="2'-OMe-nucleotide"
  modified_base 20..20: /mod_base="OTHER" /note="2'-OMe-nucleotide"
  misc_feature 20..21: /note="phosphorothioate bond"
  modified_base 21..21: /mod_base="OTHER" /note="2'-OMe-nucleotide"
  misc_feature 21..22: /note="phosphorothioate bond"
  modified_base 22..22: /mod_base="OTHER" /note="2'-OMe-nucleotide"
tttagacaauucaucauuugau

SEQ ID NO: 865 - DNA, 22 bp, Artificial Sequence
  Description of Artificial Sequence: Synthetic oligonucleotide
  Description of Combined DNA/RNA Molecule: Synthetic oligonucleotide
  N-term hydroxyl group
  C-term hydroxyl group
  modified_base 1..1: /mod_base="OTHER" /note="GalNAc-morpholino-thymidine analog 7"
  modified_base 2..2: /mod_base="OTHER" /note="GalNAc-morpholino-thymidine analog 7"
  modified_base 3..3: /mod_base="OTHER" /note="GalNAc-morpholino-thymidine analog 7"
  modified_base 4..4: /mod_base="OTHER" /note="2'-OMe-nucleotide"
  modified_base 5..5: /mod_base="OTHER" /note="2'-OMe-nucleotide"
  modified_base 6..6: /mod_base="OTHER" /note="2'-OMe-nucleotide"
  modified_base 7..7: /mod_base="OTHER" /note="2'-OMe-nucleotide"
  modified_base 8..8: /mod_base="OTHER" /note="2'-fluoro-nucleotide"
  modified_base 9..9: /mod_base="OTHER" /note="2'-OMe-nucleotide"
  modified_base 10..10: /mod_base="OTHER" /note="2'-fluoro-nucleotide"
  modified_base 11..11: /mod_base="OTHER" /note="2'-OMe-nucleotide"
  modified_base 12..12: /mod_base="OTHER" /note="2'-fluoro-nucleotide"
  modified_base 13..13: /mod_base="OTHER" /note="2'-fluoro-nucleotide"
  modified_base 14..14: /mod_base="OTHER" /note="2'-fluoro-nucleotide"
  modified_base 15..15: /mod_base="OTHER" /note="2'-OMe-nucleotide"
  modified_base 16..16: /mod_base="OTHER" /note="2'-OMe-nucleotide"
  modified_base 17..17: /mod_base="OTHER" /note="2'-OMe-nucleotide"
  modified_base 18..18: /mod_base="OTHER" /note="2'-OMe-nucleotide"
  modified_base 19..19: /mod_base="OTHER" /note="2'-OMe-nucleotide"
  modified_base 20..20: /mod_base="OTHER" /note="2'-OMe-nucleotide"
  misc_feature 20..21: /note="phosphorothioate bond"
  modified_base 21..21: /mod_base="OTHER" /note="2'-OMe-nucleotide"
  misc_feature 21..22: /note="phosphorothioate bond"
  modified_base 22..22: /mod_base="OTHER" /note="2'-OMe-nucleotide"
tttagacaauucaucauuugau

SEQ ID NO: 866 - DNA, 22 bp, Artificial Sequence
  Description of Artificial Sequence: Synthetic oligonucleotide
  Description of Combined DNA/RNA Molecule: Synthetic oligonucleotide
  N-term hydroxyl group
  C-term hydroxyl group
  modified_base 1..1: /mod_base="OTHER" /note="GalNAc-morpholino-thymidine analog 7"
  modified_base 2..2: /mod_base="OTHER" /note="GalNAc-morpholino-thymidine analog 7"
  modified_base 3..3: /mod_base="OTHER" /note="GalNAc-morpholino-thymidine analog 7"
  modified_base 4..4: /mod_base="OTHER" /note="2'-OMe-nucleotide"
  modified_base 5..5: /mod_base="OTHER" /note="2'-OMe-nucleotide"
  modified_base 6..6: /mod_base="OTHER" /note="2'-OMe-nucleotide"
  modified_base 7..7: /mod_base="OTHER" /note="2'-OMe-nucleotide"
  modified_base 8..8: /mod_base="OTHER" /note="2'-fluoro-nucleotide"
  modified_base 9..9: /mod_base="OTHER" /note="2'-OMe-nucleotide"
  modified_base 10..10: /mod_base="OTHER" /note="2'-fluoro-nucleotide"
  modified_base 11..11: /mod_base="OTHER" /note="2'-OMe-nucleotide"
  modified_base 12..12: /mod_base="OTHER" /note="2'-fluoro-nucleotide"
  modified_base 13..13: /mod_base="OTHER" /note="2'-fluoro-nucleotide"
  modified_base 14..14: /mod_base="OTHER" /note="2'-fluoro-nucleotide"
  modified_base 15..15: /mod_base="OTHER" /note="2'-OMe-nucleotide"
  modified_base 16..16: /mod_base="OTHER" /note="2'-OMe-nucleotide"
  modified_base 17..17: /mod_base="OTHER" /note="2'-OMe-nucleotide"
  modified_base 18..18: /mod_base="OTHER" /note="2'-OMe-nucleotide"
  modified_base 19..19: /mod_base="OTHER" /note="2'-OMe-nucleotide"
  modified_base 20..20: /mod_base="OTHER" /note="2'-OMe-nucleotide"
  misc_feature 20..21: /note="phosphorothioate bond"
  modified_base 21..21: /mod_base="OTHER" /note="2'-OMe-nucleotide"
  misc_feature 21..22: /note="phosphorothioate bond"
  modified_base 22..22: /mod_base="OTHER" /note="2'-OMe-nucleotide"
tttagacaauucaucauuugau

SEQ ID NO: 867 - DNA, 22 bp, Artificial Sequence
  Description of Artificial Sequence: Synthetic oligonucleotide
  Description of Combined DNA/RNA Molecule: Synthetic oligonucleotide
  N-term hydroxyl group
  C-term hydroxyl group
  modified_base 1..1: /mod_base="OTHER" /note="GalNAc-morpholino-thymidine analog 7"
  modified_base 2..2: /mod_base="OTHER" /note="GalNAc-morpholino-thymidine analog 7"
  modified_base 3..3: /mod_base="OTHER" /note="GalNAc-morpholino-thymidine analog 7"
  modified_base 4..4: /mod_base="OTHER" /note="2'-OMe-nucleotide"
  modified_base 5..5: /mod_base="OTHER" /note="2'-OMe-nucleotide"
  modified_base 6..6: /mod_base="OTHER" /note="2'-OMe-nucleotide"
  modified_base 7..7: /mod_base="OTHER" /note="2'-OMe-nucleotide"
  modified_base 8..8: /mod_base="OTHER" /note="2'-fluoro-nucleotide"
  modified_base 9..9: /mod_base="OTHER" /note="2'-OMe-nucleotide"
  modified_base 10..10: /mod_base="OTHER" /note="2'-fluoro-nucleotide"
  modified_base 11..11: /mod_base="OTHER" /note="2'-OMe-nucleotide"
  modified_base 12..12: /mod_base="OTHER" /note="2'-fluoro-nucleotide"
  modified_base 13..13: /mod_base="OTHER" /note="2'-fluoro-nucleotide"
  modified_base 14..14: /mod_base="OTHER" /note="2'-fluoro-nucleotide"
  modified_base 15..15: /mod_base="OTHER" /note="2'-OMe-nucleotide"
  modified_base 16..16: /mod_base="OTHER" /note="2'-OMe-nucleotide"
  modified_base 17..17: /mod_base="OTHER" /note="2'-OMe-nucleotide"
  modified_base 18..18: /mod_base="OTHER" /note="2'-OMe-nucleotide"
  modified_base 19..19: /mod_base="OTHER" /note="2'-OMe-nucleotide"
  modified_base 20..20: /mod_base="OTHER" /note="2'-OMe-nucleotide"
  misc_feature 20..21: /note="phosphorothioate bond"
  modified_base 21..21: /mod_base="OTHER" /note="2'-OMe-nucleotide"
  misc_feature 21..22: /note="phosphorothioate bond"
  modified_base 22..22: /mod_base="OTHER" /note="2'-OMe-nucleotide"
tttagacaauucaucauuugau

SEQ ID NO: 868 - DNA, 22 bp, Artificial Sequence
  Description of Artificial Sequence: Synthetic oligonucleotide
  Description of Combined DNA/RNA Molecule: Synthetic oligonucleotide
  N-term hydroxyl group
  C-term hydroxyl group
  modified_base 1..1: /mod_base="OTHER" /note="GalNAc-morpholino-thymidine analog 7"
  modified_base 2..2: /mod_base="OTHER" /note="GalNAc-morpholino-thymidine analog 7"
  modified_base 3..3: /mod_base="OTHER" /note="GalNAc-morpholino-thymidine analog 7"
  modified_base 4..4: /mod_base="OTHER" /note="2'-OMe-nucleotide"
  modified_base 5..5: /mod_base="OTHER" /note="2'-OMe-nucleotide"
  modified_base 6..6: /mod_base="OTHER" /note="2'-OMe-nucleotide"
  modified_base 7..7: /mod_base="OTHER" /note="2'-OMe-nucleotide"
  modified_base 8..8: /mod_base="OTHER" /note="2'-fluoro-nucleotide"
  modified_base 9..9: /mod_base="OTHER" /note="2'-OMe-nucleotide"
  modified_base 10..10: /mod_base="OTHER" /note="2'-fluoro-nucleotide"
  modified_base 11..11: /mod_base="OTHER" /note="2'-OMe-nucleotide"
  modified_base 12..12: /mod_base="OTHER" /note="2'-fluoro-nucleotide"
  modified_base 13..13: /mod_base="OTHER" /note="2'-fluoro-nucleotide"
  modified_base 14..14: /mod_base="OTHER" /note="2'-fluoro-nucleotide"
  modified_base 15..15: /mod_base="OTHER" /note="2'-OMe-nucleotide"
  modified_base 16..16: /mod_base="OTHER" /note="2'-OMe-nucleotide"
  modified_base 17..17: /mod_base="OTHER" /note="2'-OMe-nucleotide"
  modified_base 18..18: /mod_base="OTHER" /note="2'-OMe-nucleotide"
  modified_base 19..19: /mod_base="OTHER" /note="2'-OMe-nucleotide"
  modified_base 20..20: /mod_base="OTHER" /note="2'-OMe-nucleotide"
  misc_feature 20..21: /note="phosphorothioate bond"
  modified_base 21..21: /mod_base="OTHER" /note="2'-OMe-nucleotide"
  misc_feature 21..22: /note="phosphorothioate bond"
  modified_base 22..22: /mod_base="OTHER" /note="2'-OMe-nucleotide"
tttagacaauucaucauuugau

SEQ ID NO: 869 - DNA, 22 bp, Artificial Sequence
  Description of Artificial Sequence: Synthetic oligonucleotide
  Description of Combined DNA/RNA Molecule: Synthetic oligonucleotide
  N-term hydroxyl group
  C-term hydroxyl group
  modified_base 1..1: /mod_base="OTHER" /note="GalNAc-morpholino-thymidine analog 7"
  modified_base 2..2: /mod_base="OTHER" /note="GalNAc-morpholino-thymidine analog 7"
  modified_base 3..3: /mod_base="OTHER" /note="GalNAc-morpholino-thymidine analog 7"
  modified_base 4..4: /mod_base="OTHER" /note="2'-OMe-nucleotide"
  modified_base 5..5: /mod_base="OTHER" /note="2'-OMe-nucleotide"
  modified_base 6..6: /mod_base="OTHER" /note="2'-OMe-nucleotide"
  modified_base 7..7: /mod_base="OTHER" /note="2'-OMe-nucleotide"
  modified_base 8..8: /mod_base="OTHER" /note="2'-fluoro-nucleotide"
  modified_base 9..9: /mod_base="OTHER" /note="2'-OMe-nucleotide"
  modified_base 10..10: /mod_base="OTHER" /note="2'-fluoro-nucleotide"
  modified_base 11..11: /mod_base="OTHER" /note="2'-OMe-nucleotide"
  modified_base 12..12: /mod_base="OTHER" /note="2'-fluoro-nucleotide"
  modified_base 13..13: /mod_base="OTHER" /note="2'-fluoro-nucleotide"
  modified_base 14..14: /mod_base="OTHER" /note="2'-fluoro-nucleotide"
  modified_base 15..15: /mod_base="OTHER" /note="2'-OMe-nucleotide"
  modified_base 16..16: /mod_base="OTHER" /note="2'-OMe-nucleotide"
  modified_base 17..17: /mod_base="OTHER" /note="2'-OMe-nucleotide"
  modified_base 18..18: /mod_base="OTHER" /note="2'-OMe-nucleotide"
  modified_base 19..19: /mod_base="OTHER" /note="2'-OMe-nucleotide"
  modified_base 20..20: /mod_base="OTHER" /note="2'-OMe-nucleotide"
  misc_feature 20..21: /note="phosphorothioate bond"
  modified_base 21..21: /mod_base="OTHER" /note="2'-OMe-nucleotide"
  misc_feature 21..22: /note="phosphorothioate bond"
  modified_base 22..22: /mod_base="OTHER" /note="2'-OMe-nucleotide"
tttagacaauucaucauuugau

SEQ ID NO: 870 - DNA, 22 bp, Artificial Sequence
  Description of Artificial Sequence: Synthetic oligonucleotide
  Description of Combined DNA/RNA Molecule: Synthetic oligonucleotide
  N-term hydroxyl group
  C-term hydroxyl group
  modified_base 1..1: /mod_base="OTHER" /note="GalNAc-morpholino-thymidine analog 7"
  modified_base 2..2: /mod_base="OTHER" /note="GalNAc-morpholino-thymidine analog 7"
  modified_base 3..3: /mod_base="OTHER" /note="GalNAc-morpholino-thymidine analog 7"
  modified_base 4..4: /mod_base="OTHER" /note="Locked nucleic acid (LNA) nucleotide"
  modified_base 5..5: /mod_base="OTHER" /note="Locked nucleic acid (LNA) nucleotide"
  modified_base 6..6: /mod_base="OTHER" /note="2'-OMe-nucleotide"
  modified_base 7..7: /mod_base="OTHER" /note="2'-OMe-nucleotide"
  modified_base 8..8: /mod_base="OTHER" /note="2'-fluoro-nucleotide"
  modified_base 9..9: /mod_base="OTHER" /note="2'-OMe-nucleotide"
  modified_base 10..10: /mod_base="OTHER" /note="2'-fluoro-nucleotide"
  modified_base 11..11: /mod_base="OTHER" /note="2'-OMe-nucleotide"
  modified_base 12..12: /mod_base="OTHER" /note="2'-fluoro-nucleotide"
  modified_base 13..13: /mod_base="OTHER" /note="2'-fluoro-nucleotide"
  modified_base 14..14: /mod_base="OTHER" /note="2'-fluoro-nucleotide"
  modified_base 15..15: /mod_base="OTHER" /note="2'-OMe-nucleotide"
  modified_base 16..16: /mod_base="OTHER" /note="2'-OMe-nucleotide"
  modified_base 17..17: /mod_base="OTHER" /note="2'-OMe-nucleotide"
  modified_base 18..18: /mod_base="OTHER" /note="2'-OMe-nucleotide"
  modified_base 19..19: /mod_base="OTHER" /note="2'-OMe-nucleotide"
  modified_base 20..20: /mod_base="OTHER" /note="2'-OMe-nucleotide"
  misc_feature 20..21: /note="phosphorothioate bond"
  modified_base 21..21: /mod_base="OTHER" /note="2'-OMe-nucleotide"
  misc_feature 21..22: /note="phosphorothioate bond"
  modified_base 22..22: /mod_base="OTHER" /note="2'-OMe-nucleotide"
tttagacaauucaucauuugau

SEQ ID NO: 871 - DNA, 22 bp, Artificial Sequence
  Description of Artificial Sequence: Synthetic oligonucleotide
  Description of Combined DNA/RNA Molecule: Synthetic oligonucleotide
  N-term hydroxyl group
  C-term hydroxyl group
  modified_base 1..1: /mod_base="OTHER" /note="GalNAc-morpholino-thymidine analog 7"
  modified_base 2..2: /mod_base="OTHER" /note="GalNAc-morpholino-thymidine analog 7"
  modified_base 3..3: /mod_base="OTHER" /note="GalNAc-morpholino-thymidine analog 7"
  modified_base 4..4: /mod_base="OTHER" /note="Locked nucleic acid (LNA) nucleotide"
  modified_base 5..5: /mod_base="OTHER" /note="Locked nucleic acid (LNA) nucleotide"
  modified_base 6..6: /mod_base="OTHER" /note="2'-OMe-nucleotide"
  modified_base 7..7: /mod_base="OTHER" /note="2'-OMe-nucleotide"
  modified_base 8..8: /mod_base="OTHER" /note="2'-fluoro-nucleotide"
  modified_base 9..9: /mod_base="OTHER" /note="2'-OMe-nucleotide"
  modified_base 10..10: /mod_base="OTHER" /note="2'-fluoro-nucleotide"
  modified_base 11..11: /mod_base="OTHER" /note="2'-OMe-nucleotide"
  modified_base 12..12: /mod_base="OTHER" /note="2'-fluoro-nucleotide"
  modified_base 13..13: /mod_base="OTHER" /note="2'-fluoro-nucleotide"
  modified_base 14..14: /mod_base="OTHER" /note="2'-fluoro-nucleotide"
  modified_base 15..15: /mod_base="OTHER" /note="2'-OMe-nucleotide"
  modified_base 16..16: /mod_base="OTHER" /note="2'-OMe-nucleotide"
  modified_base 17..17: /mod_base="OTHER" /note="2'-OMe-nucleotide"
  modified_base 18..18: /mod_base="OTHER" /note="2'-OMe-nucleotide"
  modified_base 19..19: /mod_base="OTHER" /note="2'-OMe-nucleotide"
  modified_base 20..20: /mod_base="OTHER" /note="2'-OMe-nucleotide"
  misc_feature 20..21: /note="phosphorothioate bond"
  modified_base 21..21: /mod_base="OTHER" /note="2'-OMe-nucleotide"
  misc_feature 21..22: /note="phosphorothioate bond"
  modified_base 22..22: /mod_base="OTHER" /note="2'-OMe-nucleotide"
tttagacaauucaucauuugau

SEQ ID NO: 872 - DNA, 22 bp, Artificial Sequence
  Description of Artificial Sequence: Synthetic oligonucleotide
  Description of Combined DNA/RNA Molecule: Synthetic oligonucleotide
  N-term hydroxyl group
  C-term hydroxyl group
  modified_base 1..1: /mod_base="OTHER" /note="GalNAc-morpholino-thymidine analog 7"
  modified_base 2..2: /mod_base="OTHER" /note="GalNAc-morpholino-thymidine analog 7"
  modified_base 3..3: /mod_base="OTHER" /note="GalNAc-morpholino-thymidine analog 7"
  modified_base 4..4: /mod_base="OTHER" /note="Locked nucleic acid (LNA) nucleotide"
  modified_base 5..5: /mod_base="OTHER" /note="Locked nucleic acid (LNA) nucleotide"
  modified_base 6..6: /mod_base="OTHER" /note="2'-OMe-nucleotide"
  modified_base 7..7: /mod_base="OTHER" /note="2'-OMe-nucleotide"
  modified_base 8..8: /mod_base="OTHER" /note="2'-fluoro-nucleotide"
  modified_base 9..9: /mod_base="OTHER" /note="2'-OMe-nucleotide"
  modified_base 10..10: /mod_base="OTHER" /note="2'-fluoro-nucleotide"
  modified_base 11..11: /mod_base="OTHER" /note="2'-OMe-nucleotide"
  modified_base 12..12: /mod_base="OTHER" /note="2'-fluoro-nucleotide"
  modified_base 13..13: /mod_base="OTHER" /note="2'-fluoro-nucleotide"
  modified_base 14..14: /mod_base="OTHER" /note="2'-fluoro-nucleotide"
  modified_base 15..15: /mod_base="OTHER" /note="2'-OMe-nucleotide"
  modified_base 16..16: /mod_base="OTHER" /note="2'-OMe-nucleotide"
  modified_base 17..17: /mod_base="OTHER" /note="2'-OMe-nucleotide"
  modified_base 18..18: /mod_base="OTHER" /note="2'-OMe-nucleotide"
  modified_base 19..19: /mod_base="OTHER" /note="2'-OMe-nucleotide"
  modified_base 20..20: /mod_base="OTHER" /note="2'-OMe-nucleotide"
  misc_feature 20..21: /note="phosphorothioate bond"
  modified_base 21..21: /mod_base="OTHER" /note="2'-OMe-nucleotide"
  misc_feature 21..22: /note="phosphorothioate bond"
  modified_base 22..22: /mod_base="OTHER" /note="2'-OMe-nucleotide"
tttagacaauucaucauuugau

SEQ ID NO: 873 - DNA, 22 bp, Artificial Sequence
  Description of Artificial Sequence: Synthetic oligonucleotide
  Description of Combined DNA/RNA Molecule: Synthetic oligonucleotide
  N-term hydroxyl group
  C-term hydroxyl group
  modified_base 1..1: /mod_base="OTHER" /note="GalNAc-morpholino-thymidine analog 7"
  modified_base 2..2: /mod_base="OTHER" /note="GalNAc-morpholino-thymidine analog 7"
  modified_base 3..3: /mod_base="OTHER" /note="GalNAc-morpholino-thymidine analog 7"
  modified_base 4..4: /mod_base="OTHER" /note="Locked nucleic acid (LNA) nucleotide"
  modified_base 5..5: /mod_base="OTHER" /note="Locked nucleic acid (LNA) nucleotide"
  modified_base 6..6: /mod_base="OTHER" /note="2'-OMe-nucleotide"
  modified_base 7..7: /mod_base="OTHER" /note="2'-OMe-nucleotide"
  modified_base 8..8: /mod_base="OTHER" /note="2'-fluoro-nucleotide"
  modified_base 9..9: /mod_base="OTHER" /note="2'-OMe-nucleotide"
  modified_base 10..10: /mod_base="OTHER" /note="2'-fluoro-nucleotide"
  modified_base 11..11: /mod_base="OTHER" /note="2'-OMe-nucleotide"
  modified_base 12..12: /mod_base="OTHER" /note="2'-fluoro-nucleotide"
  modified_base 13..13: /mod_base="OTHER" /note="2'-fluoro-nucleotide"
  modified_base 14..14: /mod_base="OTHER" /note="2'-fluoro-nucleotide"
  modified_base 15..15: /mod_base="OTHER" /note="2'-OMe-nucleotide"
  modified_base 16..16: /mod_base="OTHER" /note="2'-OMe-nucleotide"
  modified_base 17..17: /mod_base="OTHER" /note="2'-OMe-nucleotide"
  modified_base 18..18: /mod_base="OTHER" /note="2'-OMe-nucleotide"
  modified_base 19..19: /mod_base="OTHER" /note="2'-OMe-nucleotide"
  modified_base 20..20: /mod_base="OTHER" /note="2'-OMe-nucleotide"
  misc_feature 20..21: /note="phosphorothioate bond"
  modified_base 21..21: /mod_base="OTHER" /note="2'-OMe-nucleotide"
  misc_feature 21..22: /note="phosphorothioate bond"
  modified_base 22..22: /mod_base="OTHER" /note="2'-OMe-nucleotide"
tttagacaauucaucauuugau

SEQ ID NO: 874 - DNA, 22 bp, Artificial Sequence
  Description of Artificial Sequence: Synthetic oligonucleotide
  Description of Combined DNA/RNA Molecule: Synthetic oligonucleotide
  N-term hydroxyl group
  C-term hydroxyl group
  modified_base 1..1: /mod_base="OTHER" /note="GalNAc-morpholino-thymidine analog 7"
  modified_base 2..2: /mod_base="OTHER" /note="GalNAc-morpholino-thymidine analog 7"
  modified_base 3..3: /mod_base="OTHER" /note="GalNAc-morpholino-thymidine analog 7"
  modified_base 4..4: /mod_base="OTHER" /note="Locked nucleic acid (LNA) nucleotide"
  modified_base 5..5: /mod_base="OTHER" /note="Locked nucleic acid (LNA) nucleotide"
  modified_base 6..6: /mod_base="OTHER" /note="2'-OMe-nucleotide"
  modified_base 7..7: /mod_base="OTHER" /note="2'-OMe-nucleotide"
  modified_base 8..8: /mod_base="OTHER" /note="2'-fluoro-nucleotide"
  modified_base 9..9: /mod_base="OTHER" /note="2'-OMe-nucleotide"
  modified_base 10..10: /mod_base="OTHER" /note="2'-fluoro-nucleotide"
  modified_base 11..11: /mod_base="OTHER" /note="2'-OMe-nucleotide"
  modified_base 12..12: /mod_base="OTHER" /note="2'-fluoro-nucleotide"
  modified_base 13..13: /mod_base="OTHER" /note="2'-fluoro-nucleotide"
  modified_base 14..14: /mod_base="OTHER" /note="2'-fluoro-nucleotide"
  modified_base 15..15: /mod_base="OTHER" /note="2'-OMe-nucleotide"
  modified_base 16..16: /mod_base="OTHER" /note="2'-OMe-nucleotide"
  modified_base 17..17: /mod_base="OTHER" /note="2'-OMe-nucleotide"
  modified_base 18..18: /mod_base="OTHER" /note="2'-OMe-nucleotide"
  modified_base 19..19: /mod_base="OTHER" /note="2'-OMe-nucleotide"
  modified_base 20..20: /mod_base="OTHER" /note="2'-OMe-nucleotide"
  misc_feature 20..21: /note="phosphorothioate bond"
  modified_base 21..21: /mod_base="OTHER" /note="2'-OMe-nucleotide"
  misc_feature 21..22: /note="phosphorothioate bond"
  modified_base 22..22: /mod_base="OTHER" /note="2'-OMe-nucleotide"
tttagacaauucaucauuugau

SEQ ID NO: 875 - DNA, 22 bp, Artificial Sequence
  Description of Artificial Sequence: Synthetic oligonucleotide
  Description of Combined DNA/RNA Molecule: Synthetic oligonucleotide
  N-term hydroxyl group
  C-term hydroxyl group
  modified_base 1..1: /mod_base="OTHER" /note="GalNAc-morpholino-thymidine analog 7"
  modified_base 2..2: /mod_base="OTHER" /note="GalNAc-morpholino-thymidine analog 7"
  modified_base 3..3: /mod_base="OTHER" /note="GalNAc-morpholino-thymidine analog 7"
  modified_base 4..4: /mod_base="OTHER" /note="2'-OMe-nucleotide"
  modified_base 5..5: /mod_base="OTHER" /note="2'-OMe-nucleotide"
  modified_base 6..6: /mod_base="OTHER" /note="2'-OMe-nucleotide"
  modified_base 7..7: /mod_base="OTHER" /note="2'-OMe-nucleotide"
  modified_base 8..8: /mod_base="OTHER" /note="2'-fluoro-nucleotide"
  modified_base 9..9: /mod_base="OTHER" /note="2'-OMe-nucleotide"
  modified_base 10..10: /mod_base="OTHER" /note="2'-fluoro-nucleotide"
  modified_base 11..11: /mod_base="OTHER" /note="2'-fluoro-nucleotide"
  modified_base 12..12: /mod_base="OTHER" /note="2'-fluoro-nucleotide"
  modified_base 13..13: /mod_base="OTHER" /note="2'-OMe-nucleotide"
  modified_base 14..14: /mod_base="OTHER" /note="2'-OMe-nucleotide"
  modified_base 15..15: /mod_base="OTHER" /note="2'-OMe-nucleotide"
  modified_base 16..16: /mod_base="OTHER" /note="2'-OMe-nucleotide"
  modified_base 17..17: /mod_base="OTHER" /note="2'-OMe-nucleotide"
  modified_base 18..18: /mod_base="OTHER" /note="2'-OMe-nucleotide"
  modified_base 19..19: /mod_base="OTHER" /note="2'-OMe-nucleotide"
  modified_base 20..20: /mod_base="OTHER" /note="2'-OMe-nucleotide"
  modified_base 21..21: /mod_base="OTHER" /note="Cyclohexane-morpholino-thymidine analog 4"
  modified_base 22..22: /mod_base="OTHER" /note="Cyclohexane-morpholino-thymidine analog 4"
tttagacaauucaucauuugtt

SEQ ID NO: 876 - DNA, 22 bp, Artificial Sequence
  Description of Artificial Sequence: Synthetic oligonucleotide
  Description of Combined DNA/RNA Molecule: Synthetic oligonucleotide
  N-term hydroxyl group
  C-term hydroxyl group
  modified_base 1..1: /mod_base="OTHER" /note="GalNAc-morpholino-thymidine analog 7"
  modified_base 2..2: /mod_base="OTHER" /note="GalNAc-morpholino-thymidine analog 7"
  modified_base 3..3: /mod_base="OTHER" /note="GalNAc-morpholino-thymidine analog 7"
  modified_base 4..4: /mod_base="OTHER" /note="2'-OMe-nucleotide"
  modified_base 5..5: /mod_base="OTHER" /note="2'-OMe-nucleotide"
  modified_base 6..6: /mod_base="OTHER" /note="2'-OMe-nucleotide"
  modified_base 7..7: /mod_base="OTHER" /note="2'-OMe-nucleotide"
  modified_base 8..8: /mod_base="OTHER" /note="2'-fluoro-nucleotide"
  modified_base 9..9: /mod_base="OTHER" /note="2'-OMe-nucleotide"
  modified_base 10..10: /mod_base="OTHER" /note="2'-fluoro-nucleotide"
  modified_base 11..11: /mod_base="OTHER" /note="2'-fluoro-nucleotide"
  modified_base 12..12: /mod_base="OTHER" /note="2'-fluoro-nucleotide"
  modified_base 13..13: /mod_base="OTHER" /note="2'-OMe-nucleotide"
  modified_base 14..14: /mod_base="OTHER" /note="2'-OMe-nucleotide"
  modified_base 15..15: /mod_base="OTHER" /note="2'-OMe-nucleotide"
  modified_base 16..16: /mod_base="OTHER" /note="2'-OMe-nucleotide"
  modified_base 17..17: /mod_base="OTHER" /note="2'-OMe-nucleotide"
  modified_base 18..18: /mod_base="OTHER" /note="2'-OMe-nucleotide"
  modified_base 19..19: /mod_base="OTHER" /note="2'-OMe-nucleotide"
  modified_base 20..20: /mod_base="OTHER" /note="2'-OMe-nucleotide"
  modified_base 21..21: /mod_base="OTHER" /note="Cyclohexane-morpholino-thymidine analog 4"
  modified_base 22..22: /mod_base="OTHER" /note="Cyclohexane-morpholino-thymidine analog 4"
tttagacaauucaucauuugtt

SEQ ID NO: 877 - DNA, 22 bp, Artificial Sequence
  Description of Artificial Sequence: Synthetic oligonucleotide
  Description of Combined DNA/RNA Molecule: Synthetic oligonucleotide
  N-term hydroxyl group
  C-term hydroxyl group
  modified_base 1..1: /mod_base="OTHER" /note="GalNAc-morpholino-thymidine analog 7"
  modified_base 2..2: /mod_base="OTHER" /note="GalNAc-morpholino-thymidine analog 7"
  modified_base 3..3: /mod_base="OTHER" /note="GalNAc-morpholino-thymidine analog 7"
  modified_base 4..4: /mod_base="OTHER" /note="2'-OMe-nucleotide"
  modified_base 5..5: /mod_base="OTHER" /note="2'-OMe-nucleotide"
  modified_base 6..6: /mod_base="OTHER" /note="2'-OMe-nucleotide"
  modified_base 7..7: /mod_base="OTHER" /note="2'-OMe-nucleotide"
  modified_base 8..8: /mod_base="OTHER" /note="2'-fluoro-nucleotide"
  modified_base 9..9: /mod_base="OTHER" /note="2'-OMe-nucleotide"
  modified_base 10..10: /mod_base="OTHER" /note="2'-fluoro-nucleotide"
  modified_base 11..11: /mod_base="OTHER" /note="2'-fluoro-nucleotide"
  modified_base 12..12: /mod_base="OTHER" /note="2'-fluoro-nucleotide"
  modified_base 13..13: /mod_base="OTHER" /note="2'-OMe-nucleotide"
  modified_base 14..14: /mod_base="OTHER" /note="2'-OMe-nucleotide"
  modified_base 15..15: /mod_base="OTHER" /note="2'-OMe-nucleotide"
  modified_base 16..16: /mod_base="OTHER" /note="2'-OMe-nucleotide"
  modified_base 17..17: /mod_base="OTHER" /note="2'-OMe-nucleotide"
  modified_base 18..18: /mod_base="OTHER" /note="2'-OMe-nucleotide"
  modified_base 19..19: /mod_base="OTHER" /note="2'-OMe-nucleotide"
  modified_base 20..20: /mod_base="OTHER" /note="2'-OMe-nucleotide"
  modified_base 21..21: /mod_base="OTHER" /note="Cyclohexane-morpholino-thymidine analog 4"
  modified_base 22..22: /mod_base="OTHER" /note="Cyclohexane-morpholino-thymidine analog 4"
tttagacaauucaucauuugtt

SEQ ID NO: 878 - DNA, 22 bp, Artificial Sequence
  Description of Artificial Sequence: Synthetic oligonucleotide
  Description of Combined DNA/RNA Molecule: Synthetic oligonucleotide
  N-term hydroxyl group
  C-term hydroxyl group
  modified_base 1..1: /mod_base="OTHER" /note="GalNAc-morpholino-thymidine analog 7"
  modified_base 2..2: /mod_base="OTHER" /note="GalNAc-morpholino-thymidine analog 7"
  modified_base 3..3: /mod_base="OTHER" /note="GalNAc-morpholino-thymidine analog 7"
  modified_base 4..4: /mod_base="OTHER" /note="2'-OMe-nucleotide"
  modified_base 5..5: /mod_base="OTHER" /note="2'-OMe-nucleotide"
  modified_base 6..6: /mod_base="OTHER" /note="2'-OMe-nucleotide"
  modified_base 7..7: /mod_base="OTHER" /note="2'-OMe-nucleotide"
  modified_base 8..8: /mod_base="OTHER" /note="2'-fluoro-nucleotide"
  modified_base 9..9: /mod_base="OTHER" /note="2'-OMe-nucleotide"
  modified_base 10..10: /mod_base="OTHER" /note="2'-fluoro-nucleotide"
  modified_base 11..11: /mod_base="OTHER" /note="2'-fluoro-nucleotide"
  modified_base 12..12: /mod_base="OTHER" /note="2'-fluoro-nucleotide"
  modified_base 13..13: /mod_base="OTHER" /note="2'-OMe-nucleotide"
  modified_base 14..14: /mod_base="OTHER" /note="2'-OMe-nucleotide"
  modified_base 15..15: /mod_base="OTHER" /note="2'-OMe-nucleotide"
  modified_base 16..16: /mod_base="OTHER" /note="2'-OMe-nucleotide"
  modified_base 17..17: /mod_base="OTHER" /note="2'-OMe-nucleotide"
  modified_base 18..18: /mod_base="OTHER" /note="2'-OMe-nucleotide"
  modified_base 19..19: /mod_base="OTHER" /note="2'-OMe-nucleotide"
  modified_base 20..20: /mod_base="OTHER" /note="2'-OMe-nucleotide"
  modified_base 21..21: /mod_base="OTHER" /note="Cyclohexane-morpholino-thymidine analog 4"
  modified_base 22..22: /mod_base="OTHER" /note="Cyclohexane-morpholino-thymidine analog 4"
tttagacaauucaucauuugtt

SEQ ID NO: 879 - DNA, 22 bp, Artificial Sequence
  Description of Artificial Sequence: Synthetic oligonucleotide
  Description of Combined DNA/RNA Molecule: Synthetic oligonucleotide
  N-term hydroxyl group
  C-term hydroxyl group
  modified_base 1..1: /mod_base="OTHER" /note="GalNAc-morpholino-thymidine analog 7"
  modified_base 2..2: /mod_base="OTHER" /note="GalNAc-morpholino-thymidine analog 7"
  modified_base 3..3: /mod_base="OTHER" /note="GalNAc-morpholino-thymidine analog 7"
  modified_base 4..4: /mod_base="OTHER" /note="Locked nucleic acid (LNA) nucleotide"
  modified_base 5..5: /mod_base="OTHER" /note="Locked nucleic acid (LNA) nucleotide"
  modified_base 6..6: /mod_base="OTHER" /note="2'-OMe-nucleotide"
  modified_base 7..7: /mod_base="OTHER" /note="2'-OMe-nucleotide"
  modified_base 8..8: /mod_base="OTHER" /note="2'-fluoro-nucleotide"
  modified_base 9..9: /mod_base="OTHER" /note="2'-OMe-nucleotide"
  modified_base 10..10: /mod_base="OTHER" /note="2'-fluoro-nucleotide"
  modified_base 11..11: /mod_base="OTHER" /note="2'-fluoro-nucleotide"
  modified_base 12..12: /mod_base="OTHER" /note="2'-fluoro-nucleotide"
  modified_base 13..13: /mod_base="OTHER" /note="2'-OMe-nucleotide"
  modified_base 14..14: /mod_base="OTHER" /note="2'-OMe-nucleotide"
  modified_base 15..15: /mod_base="OTHER" /note="2'-OMe-nucleotide"
  modified_base 16..16: /mod_base="OTHER" /note="2'-OMe-nucleotide"
  modified_base 17..17: /mod_base="OTHER" /note="2'-OMe-nucleotide"
  modified_base 18..18: /mod_base="OTHER" /note="2'-OMe-nucleotide"
  modified_base 19..19: /mod_base="OTHER" /note="2'-OMe-nucleotide"
  modified_base 20..20: /mod_base="OTHER" /note="2'-OMe-nucleotide"
  modified_base 21..21: /mod_base="OTHER" /note="Cyclohexane-morpholino-thymidine analog 4"
  modified_base 22..22: /mod_base="OTHER" /note="Cyclohexane-morpholino-thymidine analog 4"
tttagacaauucaucauuugtt

SEQ ID NO: 880 - DNA, 22 bp, Artificial Sequence
  Description of Artificial Sequence: Synthetic oligonucleotide
  Description of Combined DNA/RNA Molecule: Synthetic oligonucleotide
  N-term hydroxyl group
  C-term hydroxyl group
  modified_base 1..1: /mod_base="OTHER" /note="GalNAc-morpholino-thymidine analog 7"
  modified_base 2..2: /mod_base="OTHER" /note="GalNAc-morpholino-thymidine analog 7"
  modified_base 3..3: /mod_base="OTHER" /note="GalNAc-morpholino-thymidine analog 7"
  modified_base 4..4: /mod_base="OTHER" /note="Locked nucleic acid (LNA) nucleotide"
  modified_base 5..5: /mod_base="OTHER" /note="Locked nucleic acid (LNA) nucleotide"
  modified_base 6..6: /mod_base="OTHER" /note="2'-OMe-nucleotide"
  modified_base 7..7: /mod_base="OTHER" /note="2'-OMe-nucleotide"
  modified_base 8..8: /mod_base="OTHER" /note="2'-fluoro-nucleotide"
  modified_base 9..9: /mod_base="OTHER" /note="2'-OMe-nucleotide"
  modified_base 10..10: /mod_base="OTHER" /note="2'-fluoro-nucleotide"
  modified_base 11..11: /mod_base="OTHER" /note="2'-fluoro-nucleotide"
  modified_base 12..12: /mod_base="OTHER" /note="2'-fluoro-nucleotide"
  modified_base 13..13: /mod_base="OTHER" /note="2'-OMe-nucleotide"
  modified_base 14..14: /mod_base="OTHER" /note="2'-OMe-nucleotide"
  modified_base 15..15: /mod_base="OTHER" /note="2'-OMe-nucleotide"
  modified_base 16..16: /mod_base="OTHER" /note="2'-OMe-nucleotide"
  modified_base 17..17: /mod_base="OTHER" /note="2'-OMe-nucleotide"
  modified_base 18..18: /mod_base="OTHER" /note="2'-OMe-nucleotide"
  modified_base 19..19: /mod_base="OTHER" /note="2'-OMe-nucleotide"
  modified_base 20..20: /mod_base="OTHER" /note="2'-OMe-nucleotide"
  modified_base 21..21: /mod_base="OTHER" /note="Cyclohexane-morpholino-thymidine analog 4"
  modified_base 22..22: /mod_base="OTHER" /note="Cyclohexane-morpholino-thymidine analog 4"
tttagacaauucaucauuugtt

SEQ ID NO: 881 - DNA, 22 bp, Artificial Sequence
  Description of Artificial Sequence: Synthetic oligonucleotide
  Description of Combined DNA/RNA Molecule: Synthetic oligonucleotide
  N-term hydroxyl group
  C-term hydroxyl group
  modified_base 1..1: /mod_base="OTHER" /note="GalNAc-morpholino-thymidine analog 7"
  modified_base 2..2: /mod_base="OTHER" /note="GalNAc-morpholino-thymidine analog 7"
  modified_base 3..3: /mod_base="OTHER" /note="GalNAc-morpholino-thymidine analog 7"
  modified_base 4..4: /mod_base="OTHER" /note="Locked nucleic acid (LNA) nucleotide"
  modified_base 5..5: /mod_base="OTHER" /note="Locked nucleic acid (LNA) nucleotide"
  modified_base 6..6: /mod_base="OTHER" /note="2'-OMe-nucleotide"
  modified_base 7..7: /mod_base="OTHER" /note="2'-OMe-nucleotide"
  modified_base 8..8: /mod_base="OTHER" /note="2'-fluoro-nucleotide"
  modified_base 9..9: /mod_base="OTHER" /note="2'-OMe-nucleotide"
  modified_base 10..10: /mod_base="OTHER" /note="2'-fluoro-nucleotide"
  modified_base 11..11: /mod_base="OTHER" /note="2'-fluoro-nucleotide"
  modified_base 12..12: /mod_base="OTHER" /note="2'-fluoro-nucleotide"
  modified_base 13..13: /mod_base="OTHER" /note="2'-OMe-nucleotide"
  modified_base 14..14: /mod_base="OTHER" /note="2'-OMe-nucleotide"
  modified_base 15..15: /mod_base="OTHER" /note="2'-OMe-nucleotide"
  modified_base 16..16: /mod_base="OTHER" /note="2'-OMe-nucleotide"
  modified_base 17..17: /mod_base="OTHER" /note="2'-OMe-nucleotide"
  modified_base 18..18: /mod_base="OTHER" /note="2'-OMe-nucleotide"
  modified_base 19..19: /mod_base="OTHER" /note="2'-OMe-nucleotide"
  modified_base 20..20: /mod_base="OTHER" /note="2'-OMe-nucleotide"
  modified_base 21..21: /mod_base="OTHER" /note="Cyclohexane-morpholino-thymidine analog 4"
  modified_base 22..22: /mod_base="OTHER" /note="Cyclohexane-morpholino-thymidine analog 4"
tttagacaauucaucauuugtt

SEQ ID NO: 882 - DNA, 22 bp, Artificial Sequence
  Description of Artificial Sequence: Synthetic oligonucleotide
  Description of Combined DNA/RNA Molecule: Synthetic oligonucleotide
  N-term hydroxyl group
  C-term hydroxyl group
  modified_base 1..1: /mod_base="OTHER" /note="GalNAc-morpholino-thymidine analog 7"
  modified_base 2..2: /mod_base="OTHER" /note="GalNAc-morpholino-thymidine analog 7"
  modified_base 3..3: /mod_base="OTHER" /note="GalNAc-morpholino-thymidine analog 7"
  modified_base 4..4: /mod_base="OTHER" /note="Locked nucleic acid (LNA) nucleotide"
  modified_base 5..5: /mod_base="OTHER" /note="Locked nucleic acid (LNA) nucleotide"
  modified_base 6..6: /mod_base="OTHER" /note="2'-OMe-nucleotide"
  modified_base 7..7: /mod_base="OTHER" /note="2'-OMe-nucleotide"
  modified_base 8..8: /mod_base="OTHER" /note="2'-fluoro-nucleotide"
  modified_base 9..9: /mod_base="OTHER" /note="2'-OMe-nucleotide"
  modified_base 10..10: /mod_base="OTHER" /note="2'-fluoro-nucleotide"
  modified_base 11..11: /mod_base="OTHER" /note="2'-fluoro-nucleotide"
  modified_base 12..12: /mod_base="OTHER" /note="2'-fluoro-nucleotide"
  modified_base 13..13: /mod_base="OTHER" /note="2'-OMe-nucleotide"
  modified_base 14..14: /mod_base="OTHER" /note="2'-OMe-nucleotide"
  modified_base 15..15: /mod_base="OTHER" /note="2'-OMe-nucleotide"
  modified_base 16..16: /mod_base="OTHER" /note="2'-OMe-nucleotide"
  modified_base 17..17: /mod_base="OTHER" /note="2'-OMe-nucleotide"
  modified_base 18..18: /mod_base="OTHER" /note="2'-OMe-nucleotide"
  modified_base 19..19: /mod_base="OTHER" /note="2'-OMe-nucleotide"
  modified_base 20..20: /mod_base="OTHER" /note="2'-OMe-nucleotide"
  modified_base 21..21: /mod_base="OTHER" /note="Cyclohexane-morpholino-thymidine analog 4"
  modified_base 22..22: /mod_base="OTHER" /note="Cyclohexane-morpholino-thymidine analog 4"
tttagacaauucaucauuugtt

SEQ ID NO: 883 - DNA, 22 bp, Artificial Sequence
  Description of Artificial Sequence: Synthetic oligonucleotide
  Description of Combined DNA/RNA Molecule: Synthetic oligonucleotide
  N-term hydroxyl group
  C-term hydroxyl group
  modified_base 1..1: /mod_base="OTHER" /note="GalNAc-morpholino-thymidine analog 7"
  modified_base 2..2: /mod_base="OTHER" /note="GalNAc-morpholino-thymidine analog 7"
  modified_base 3..3: /mod_base="OTHER" /note="GalNAc-morpholino-thymidine analog 7"
  modified_base 4..4: /mod_base="OTHER" /note="2'-OMe-nucleotide"
  modified_base 5..5: /mod_base="OTHER" /note="2'-OMe-nucleotide"
  modified_base 6..6: /mod_base="OTHER" /note="2'-OMe-nucleotide"
  modified_base 7..7: /mod_base="OTHER" /note="2'-OMe-nucleotide"
  modified_base 8..8: /mod_base="OTHER" /note="2'-fluoro-nucleotide"
  modified_base 9..9: /mod_base="OTHER" /note="2'-OMe-nucleotide"
  modified_base 10..10: /mod_base="OTHER" /note="2'-fluoro-nucleotide"
  modified_base 11..11: /mod_base="OTHER" /note="2'-OMe-nucleotide"
  modified_base 12..12: /mod_base="OTHER" /note="2'-fluoro-nucleotide"
  modified_base 13..13: /mod_base="OTHER" /note="2'-fluoro-nucleotide"
  modified_base 14..14: /mod_base="OTHER" /note="2'-fluoro-nucleotide"
  modified_base 15..15: /mod_base="OTHER" /note="2'-OMe-nucleotide"
  modified_base 16..16: /mod_base="OTHER" /note="2'-OMe-nucleotide"
  modified_base 17..17: /mod_base="OTHER" /note="2'-OMe-nucleotide"
  modified_base 18..18: /mod_base="OTHER" /note="2'-OMe-nucleotide"
  modified_base 19..19: /mod_base="OTHER" /note="2'-OMe-nucleotide"
  modified_base 20..20: /mod_base="OTHER" /note="2'-OMe-nucleotide"
  modified_base 21..21: /mod_base="OTHER" /note="Cyclohexane-morpholino-thymidine analog 4"
  modified_base 22..22: /mod_base="OTHER" /note="Cyclohexane-morpholino-thymidine analog 4"
tttagacaauucaucauuugtt

SEQ ID NO: 884 - DNA, 22 bp, Artificial Sequence
  Description of Artificial Sequence: Synthetic oligonucleotide
  Description of Combined DNA/RNA Molecule: Synthetic oligonucleotide
  N-term hydroxyl group
  C-term hydroxyl group
  modified_base 1..1: /mod_base="OTHER" /note="GalNAc-morpholino-thymidine analog 7"
  modified_base 2..2: /mod_base="OTHER" /note="GalNAc-morpholino-thymidine analog 7"
  modified_base 3..3: /mod_base="OTHER" /note="GalNAc-morpholino-thymidine analog 7"
  modified_base 4..4: /mod_base="OTHER" /note="2'-OMe-nucleotide"
  modified_base 5..5: /mod_base="OTHER" /note="2'-OMe-nucleotide"
  modified_base 6..6: /mod_base="OTHER" /note="2'-OMe-nucleotide"
  modified_base 7..7: /mod_base="OTHER" /note="2'-OMe-nucleotide"
  modified_base 8..8: /mod_base="OTHER" /note="2'-fluoro-nucleotide"
  modified_base 9..9: /mod_base="OTHER" /note="2'-OMe-nucleotide"
  modified_base 10..10: /mod_base="OTHER" /note="2'-fluoro-nucleotide"
  modified_base 11..11: /mod_base="OTHER" /note="2'-OMe-nucleotide"
  modified_base 12..12: /mod_base="OTHER" /note="2'-fluoro-nucleotide"
  modified_base 13..13: /mod_base="OTHER" /note="2'-fluoro-nucleotide"
  modified_base 14..14: /mod_base="OTHER" /note="2'-fluoro-nucleotide"
  modified_base 15..15: /mod_base="OTHER" /note="2'-OMe-nucleotide"
  modified_base 16..16: /mod_base="OTHER" /note="2'-OMe-nucleotide"
  modified_base 17..17: /mod_base="OTHER" /note="2'-OMe-nucleotide"
  modified_base 18..18: /mod_base="OTHER" /note="2'-OMe-nucleotide"
  modified_base 19..19: /mod_base="OTHER" /note="2'-OMe-nucleotide"
  modified_base 20..20: /mod_base="OTHER" /note="2'-OMe-nucleotide"
  modified_base 21..21: /mod_base="OTHER" /note="Cyclohexane-morpholino-thymidine analog 4"
  modified_base 22..22: /mod_base="OTHER" /note="Cyclohexane-morpholino-thymidine analog 4"
tttagacaauucaucauuugtt

SEQ ID NO: 885 - DNA, 22 bp, Artificial Sequence
  Description of Artificial Sequence: Synthetic oligonucleotide
  Description of Combined DNA/RNA Molecule: Synthetic oligonucleotide
  N-term hydroxyl group
  C-term hydroxyl group
  modified_base 1..1: /mod_base="OTHER" /note="GalNAc-morpholino-thymidine analog 7"
  modified_base 2..2: /mod_base="OTHER" /note="GalNAc-morpholino-thymidine analog 7"
  modified_base 3..3: /mod_base="OTHER" /note="GalNAc-morpholino-thymidine analog 7"
  modified_base 4..4: /mod_base="OTHER" /note="2'-OMe-nucleotide"
  modified_base 5..5: /mod_base="OTHER" /note="2'-OMe-nucleotide"
  modified_base 6..6: /mod_base="OTHER" /note="2'-OMe-nucleotide"
  modified_base 7..7: /mod_base="OTHER" /note="2'-OMe-nucleotide"
  modified_base 8..8: /mod_base="OTHER" /note="2'-fluoro-nucleotide"
  modified_base 9..9: /mod_base="OTHER" /note="2'-OMe-nucleotide"
  modified_base 10..10: /mod_base="OTHER" /note="2'-fluoro-nucleotide"
  modified_base 11..11: /mod_base="OTHER" /note="2'-OMe-nucleotide"
  modified_base 12..12: /mod_base="OTHER" /note="2'-fluoro-nucleotide"
  modified_base 13..13: /mod_base="OTHER" /note="2'-fluoro-nucleotide"
  modified_base 14..14: /mod_base="OTHER" /note="2'-fluoro-nucleotide"
  modified_base 15..15: /mod_base="OTHER" /note="2'-OMe-nucleotide"
  modified_base 16..16: /mod_base="OTHER" /note="2'-OMe-nucleotide"
  modified_base 17..17: /mod_base="OTHER" /note="2'-OMe-nucleotide"
  modified_base 18..18: /mod_base="OTHER" /note="2'-OMe-nucleotide"
  modified_base 19..19: /mod_base="OTHER" /note="2'-OMe-nucleotide"
  modified_base 20..20: /mod_base="OTHER" /note="2'-OMe-nucleotide"
  modified_base 21..21: /mod_base="OTHER" /note="Cyclohexane-morpholino-thymidine analog 4"
  modified_base 22..22: /mod_base="OTHER" /note="Cyclohexane-morpholino-thymidine analog 4"
tttagacaauucaucauuugtt

SEQ ID NO: 886 - DNA, 22 bp, Artificial Sequence
  Description of Artificial Sequence: Synthetic oligonucleotide
  Description of Combined DNA/RNA Molecule: Synthetic oligonucleotide
  N-term hydroxyl group
  C-term hydroxyl group
  modified_base 1..1: /mod_base="OTHER" /note="GalNAc-morpholino-thymidine analog 7"
  modified_base 2..2: /mod_base="OTHER" /note="GalNAc-morpholino-thymidine analog 7"
  modified_base 3..3: /mod_base="OTHER" /note="GalNAc-morpholino-thymidine analog 7"
  modified_base 4..4: /mod_base="OTHER" /note="2'-OMe-nucleotide"
  modified_base 5..5: /mod_base="OTHER" /note="2'-OMe-nucleotide"
  modified_base 6..6: /mod_base="OTHER" /note="2'-OMe-nucleotide"
  modified_base 7..7: /mod_base="OTHER" /note="2'-OMe-nucleotide"
  modified_base 8..8: /mod_base="OTHER" /note="2'-fluoro-nucleotide"
  modified_base 9..9: /mod_base="OTHER" /note="2'-OMe-nucleotide"
  modified_base 10..10: /mod_base="OTHER" /note="2'-fluoro-nucleotide"
  modified_base 11..11: /mod_base="OTHER" /note="2'-OMe-nucleotide"
  modified_base 12..12: /mod_base="OTHER" /note="2'-fluoro-nucleotide"
  modified_base 13..13: /mod_base="OTHER" /note="2'-fluoro-nucleotide"
  modified_base 14..14: /mod_base="OTHER" /note="2'-fluoro-nucleotide"
  modified_base 15..15: /mod_base="OTHER" /note="2'-OMe-nucleotide"
  modified_base 16..16: /mod_base="OTHER" /note="2'-OMe-nucleotide"
  modified_base 17..17: /mod_base="OTHER" /note="2'-OMe-nucleotide"
  modified_base 18..18: /mod_base="OTHER" /note="2'-OMe-nucleotide"
  modified_base 19..19: /mod_base="OTHER" /note="2'-OMe-nucleotide"
  modified_base 20..20: /mod_base="OTHER" /note="2'-OMe-nucleotide"
  modified_base 21..21: /mod_base="OTHER" /note="Cyclohexane-morpholino-thymidine analog 4"
  modified_base 22..22: /mod_base="OTHER" /note="Cyclohexane-morpholino-thymidine analog 4"
tttagacaauucaucauuugtt

SEQ ID NO: 887 - DNA, 22 bp, Artificial Sequence
  Description of Artificial Sequence: Synthetic oligonucleotide
  Description of Combined DNA/RNA Molecule: Synthetic oligonucleotide
  N-term hydroxyl group
  C-term hydroxyl group
  modified_base 1..1: /mod_base="OTHER" /note="GalNAc-morpholino-thymidine analog 7"
  modified_base 2..2: /mod_base="OTHER" /note="GalNAc-morpholino-thymidine analog 7"
  modified_base 3..3: /mod_base="OTHER" /note="GalNAc-morpholino-thymidine analog 7"
  modified_base 4..4: /mod_base="OTHER" /note="2'-OMe-nucleotide"
  modified_base 5..5: /mod_base="OTHER" /note="2'-OMe-nucleotide"
  modified_base 6..6: /mod_base="OTHER" /note="2'-OMe-nucleotide"
  modified_base 7..7: /mod_base="OTHER" /note="2'-OMe-nucleotide"
  modified_base 8..8: /mod_base="OTHER" /note="2'-fluoro-nucleotide"
  modified_base 9..9: /mod_base="OTHER" /note="2'-OMe-nucleotide"
  modified_base 10..10: /mod_base="OTHER" /note="2'-fluoro-nucleotide"
  modified_base 11..11: /mod_base="OTHER" /note="2'-OMe-nucleotide"
  modified_base 12..12: /mod_base="OTHER" /note="2'-fluoro-nucleotide"
  modified_base 13..13: /mod_base="OTHER" /note="2'-fluoro-nucleotide"
  modified_base 14..14: /mod_base="OTHER" /note="2'-fluoro-nucleotide"
  modified_base 15..15: /mod_base="OTHER" /note="2'-OMe-nucleotide"
  modified_base 16..16: /mod_base="OTHER" /note="2'-OMe-nucleotide"
  modified_base 17..17: /mod_base="OTHER" /note="2'-OMe-nucleotide"
  modified_base 18..18: /mod_base="OTHER" /note="2'-OMe-nucleotide"
  modified_base 19..19: /mod_base="OTHER" /note="2'-OMe-nucleotide"
  modified_base 20..20: /mod_base="OTHER" /note="2'-OMe-nucleotide"
  modified_base 21..21: /mod_base="OTHER" /note="Cyclohexane-morpholino-thymidine analog 4"
  modified_base 22..22: /mod_base="OTHER" /note="Cyclohexane-morpholino-thymidine analog 4"
tttagacaauucaucauuugtt

SEQ ID NO: 888 - DNA, 22 bp, Artificial Sequence
  Description of Artificial Sequence: Synthetic oligonucleotide
  Description of Combined DNA/RNA Molecule: Synthetic oligonucleotide
  N-term hydroxyl group
  C-term hydroxyl group
  modified_base 1..1: /mod_base="OTHER" /note="GalNAc-morpholino-thymidine analog 7"
  modified_base 2..2: /mod_base="OTHER" /note="GalNAc-morpholino-thymidine analog 7"
  modified_base 3..3: /mod_base="OTHER" /note="GalNAc-morpholino-thymidine analog 7"
  modified_base 4..4: /mod_base="OTHER" /note="Locked nucleic acid (LNA) nucleotide"
  modified_base 5..5: /mod_base="OTHER" /note="Locked nucleic acid (LNA) nucleotide"
  modified_base 6..6: /mod_base="OTHER" /note="2'-OMe-nucleotide"
  modified_base 7..7: /mod_base="OTHER" /note="2'-OMe-nucleotide"
  modified_base 8..8: /mod_base="OTHER" /note="2'-fluoro-nucleotide"
  modified_base 9..9: /mod_base="OTHER" /note="2'-OMe-nucleotide"
  modified_base 10..10: /mod_base="OTHER" /note="2'-fluoro-nucleotide"
  modified_base 11..11: /mod_base="OTHER" /note="2'-OMe-nucleotide"
  modified_base 12..12: /mod_base="OTHER" /note="2'-fluoro-nucleotide"
  modified_base 13..13: /mod_base="OTHER" /note="2'-fluoro-nucleotide"
  modified_base 14..14: /mod_base="OTHER" /note="2'-fluoro-nucleotide"
  modified_base 15..15: /mod_base="OTHER" /note="2'-OMe-nucleotide"
  modified_base 16..16: /mod_base="OTHER" /note="2'-OMe-nucleotide"
  modified_base 17..17: /mod_base="OTHER" /note="2'-OMe-nucleotide"
  modified_base 18..18: /mod_base="OTHER" /note="2'-OMe-nucleotide"
  modified_base 19..19: /mod_base="OTHER" /note="2'-OMe-nucleotide"
  modified_base 20..20: /mod_base="OTHER" /note="2'-OMe-nucleotide"
  modified_base 21..21: /mod_base="OTHER" /note="Cyclohexane-morpholino-thymidine analog 4"
  modified_base 22..22: /mod_base="OTHER" /note="Cyclohexane-morpholino-thymidine analog 4"
tttagacaauucaucauuugtt

SEQ ID NO: 889 - DNA, 22 bp, Artificial Sequence
  Description of Artificial Sequence: Synthetic oligonucleotide
  Description of Combined DNA/RNA Molecule: Synthetic oligonucleotide
  N-term hydroxyl group
  C-term hydroxyl group
  modified_base 1..1: /mod_base="OTHER" /note="GalNAc-morpholino-thymidine analog 7"
  modified_base 2..2: /mod_base="OTHER" /note="GalNAc-morpholino-thymidine analog 7"
  modified_base 3..3: /mod_base="OTHER" /note="GalNAc-morpholino-thymidine analog 7"
  modified_base 4..4: /mod_base="OTHER" /note="Locked nucleic acid (LNA) nucleotide"
  modified_base 5..5: /mod_base="OTHER" /note="Locked nucleic acid (LNA) nucleotide"
  modified_base 6..6: /mod_base="OTHER" /note="2'-OMe-nucleotide"
  modified_base 7..7: /mod_base="OTHER" /note="2'-OMe-nucleotide"
  modified_base 8..8: /mod_base="OTHER" /note="2'-fluoro-nucleotide"
  modified_base 9..9: /mod_base="OTHER" /note="2'-OMe-nucleotide"
  modified_base 10..10: /mod_base="OTHER" /note="2'-fluoro-nucleotide"
  modified_base 11..11: /mod_base="OTHER" /note="2'-OMe-nucleotide"
  modified_base 12..12: /mod_base="OTHER" /note="2'-fluoro-nucleotide"
  modified_base 13..13: /mod_base="OTHER" /note="2'-fluoro-nucleotide"
  modified_base 14..14: /mod_base="OTHER" /note="2'-fluoro-nucleotide"
  modified_base 15..15: /mod_base="OTHER" /note="2'-OMe-nucleotide"
  modified_base 16..16: /mod_base="OTHER" /note="2'-OMe-nucleotide"
  modified_base 17..17: /mod_base="OTHER" /note="2'-OMe-nucleotide"
  modified_base 18..18: /mod_base="OTHER" /note="2'-OMe-nucleotide"
  modified_base 19..19: /mod_base="OTHER" /note="2'-OMe-nucleotide"
  modified_base 20..20: /mod_base="OTHER" /note="2'-OMe-nucleotide"
  modified_base 21..21: /mod_base="OTHER" /note="Cyclohexane-morpholino-thymidine analog 4"
  modified_base 22..22: /mod_base="OTHER" /note="Cyclohexane-morpholino-thymidine analog 4"
tttagacaauucaucauuugtt

SEQ ID NO: 890 - DNA, 22 bp, Artificial Sequence
  Description of Artificial Sequence: Synthetic oligonucleotide
  Description of Combined DNA/RNA Molecule: Synthetic oligonucleotide
  N-term hydroxyl group
  C-term hydroxyl group
  modified_base 1..1: /mod_base="OTHER" /note="GalNAc-morpholino-thymidine analog 7"
  modified_base 2..2: /mod_base="OTHER" /note="GalNAc-morpholino-thymidine analog 7"
  modified_base 3..3: /mod_base="OTHER" /note="GalNAc-morpholino-thymidine analog 7"
  modified_base 4..4: /mod_base="OTHER" /note="Locked nucleic acid (LNA) nucleotide"
  modified_base 5..5: /mod_base="OTHER" /note="Locked nucleic acid (LNA) nucleotide"
  modified_base 6..6: /mod_base="OTHER" /note="2'-OMe-nucleotide"
  modified_base 7..7: /mod_base="OTHER" /note="2'-OMe-nucleotide"
  modified_base 8..8: /mod_base="OTHER" /note="2'-fluoro-nucleotide"
  modified_base 9..9: /mod_base="OTHER" /note="2'-OMe-nucleotide"
  modified_base 10..10: /mod_base="OTHER" /note="2'-fluoro-nucleotide"
  modified_base 11..11: /mod_base="OTHER" /note="2'-OMe-nucleotide"
  modified_base 12..12: /mod_base="OTHER" /note="2'-fluoro-nucleotide"
  modified_base 13..13: /mod_base="OTHER" /note="2'-fluoro-nucleotide"
  modified_base 14..14: /mod_base="OTHER" /note="2'-fluoro-nucleotide"
  modified_base 15..15: /mod_base="OTHER" /note="2'-OMe-nucleotide"
  modified_base 16..16: /mod_base="OTHER" /note="2'-OMe-nucleotide"
  modified_base 17..17: /mod_base="OTHER" /note="2'-OMe-nucleotide"
  modified_base 18..18: /mod_base="OTHER" /note="2'-OMe-nucleotide"
  modified_base 19..19: /mod_base="OTHER" /note="2'-OMe-nucleotide"
  modified_base 20..20: /mod_base="OTHER" /note="2'-OMe-nucleotide"
  modified_base 21..21: /mod_base="OTHER" /note="Cyclohexane-morpholino-thymidine analog 4"
  modified_base 22..22: /mod_base="OTHER" /note="Cyclohexane-morpholino-thymidine analog 4"
tttagacaauucaucauuugtt

SEQ ID NO: 891 - DNA, 22 bp, Artificial Sequence
  Description of Artificial Sequence: Synthetic oligonucleotide
  Description of Combined DNA/RNA Molecule: Synthetic oligonucleotide
  N-term hydroxyl group
  C-term hydroxyl group
  modified_base 1..1: /mod_base="OTHER" /note="GalNAc-morpholino-thymidine analog 7"
  modified_base 2..2: /mod_base="OTHER" /note="GalNAc-morpholino-thymidine analog 7"
  modified_base 3..3: /mod_base="OTHER" /note="GalNAc-morpholino-thymidine analog 7"
  modified_base 4..4: /mod_base="OTHER" /note="Locked nucleic acid (LNA) nucleotide"
  modified_base 5..5: /mod_base="OTHER" /note="Locked nucleic acid (LNA) nucleotide"
  modified_base 6..6: /mod_base="OTHER" /note="2'-OMe-nucleotide"
  modified_base 7..7: /mod_base="OTHER" /note="2'-OMe-nucleotide"
  modified_base 8..8: /mod_base="OTHER" /note="2'-fluoro-nucleotide"
  modified_base 9..9: /mod_base="OTHER" /note="2'-OMe-nucleotide"
  modified_base 10..10: /mod_base="OTHER" /note="2'-fluoro-nucleotide"
  modified_base 11..11: /mod_base="OTHER" /note="2'-OMe-nucleotide"
  modified_base 12..12: /mod_base="OTHER" /note="2'-fluoro-nucleotide"
  modified_base 13..13: /mod_base="OTHER" /note="2'-fluoro-nucleotide"
  modified_base 14..14: /mod_base="OTHER" /note="2'-fluoro-nucleotide"
  modified_base 15..15: /mod_base="OTHER" /note="2'-OMe-nucleotide"
  modified_base 16..16: /mod_base="OTHER" /note="2'-OMe-nucleotide"
  modified_base 17..17: /mod_base="OTHER" /note="2'-OMe-nucleotide"
  modified_base 18..18: /mod_base="OTHER" /note="2'-OMe-nucleotide"
  modified_base 19..19: /mod_base="OTHER" /note="2'-OMe-nucleotide"
  modified_base 20..20: /mod_base="OTHER" /note="2'-OMe-nucleotide"
  modified_base 21..21: /mod_base="OTHER" /note="Cyclohexane-morpholino-thymidine analog 4"
  modified_base 22..22: /mod_base="OTHER" /note="Cyclohexane-morpholino-thymidine analog 4"
tttagacaauucaucauuugtt

SEQ ID NO: 892 - DNA, 22 bp, Artificial Sequence
  Description of Artificial Sequence: Synthetic oligonucleotide
  Description of Combined DNA/RNA Molecule: Synthetic oligonucleotide
  N-term hydroxyl group
  C-term hydroxyl group
  modified_base 1..1: /mod_base="OTHER" /note="GalNAc-morpholino-thymidine analog 7"
  modified_base 2..2: /mod_base="OTHER" /note="GalNAc-morpholino-thymidine analog 7"
  modified_base 3..3: /mod_base="OTHER" /note="GalNAc-morpholino-thymidine analog 7"
  modified_base 4..4: /mod_base="OTHER" /note="Locked nucleic acid (LNA) nucleotide"
  modified_base 5..5: /mod_base="OTHER" /note="Locked nucleic acid (LNA) nucleotide"
  modified_base 6..6: /mod_base="OTHER" /note="2'-OMe-nucleotide"
  modified_base 7..7: /mod_base="OTHER" /note="2'-OMe-nucleotide"
  modified_base 8..8: /mod_base="OTHER" /note="2'-fluoro-nucleotide"
  modified_base 9..9: /mod_base="OTHER" /note="2'-OMe-nucleotide"
  modified_base 10..10: /mod_base="OTHER" /note="2'-fluoro-nucleotide"
  modified_base 11..11: /mod_base="OTHER" /note="2'-OMe-nucleotide"
  modified_base 12..12: /mod_base="OTHER" /note="2'-fluoro-nucleotide"
  modified_base 13..13: /mod_base="OTHER" /note="2'-fluoro-nucleotide"
  modified_base 14..14: /mod_base="OTHER" /note="2'-fluoro-nucleotide"
  modified_base 15..15: /mod_base="OTHER" /note="2'-OMe-nucleotide"
  modified_base 16..16: /mod_base="OTHER" /note="2'-OMe-nucleotide"
  modified_base 17..17: /mod_base="OTHER" /note="2'-OMe-nucleotide"
  modified_base 18..18: /mod_base="OTHER" /note="2'-OMe-nucleotide"
  modified_base 19..19: /mod_base="OTHER" /note="2'-OMe-nucleotide"
  modified_base 20..20: /mod_base="OTHER" /note="2'-OMe-nucleotide"
  modified_base 21..21: /mod_base="OTHER" /note="Cyclohexane-morpholino-thymidine analog 4"
  modified_base 22..22: /mod_base="OTHER" /note="Cyclohexane-morpholino-thymidine analog 4"
tttagacaauucaucauuugtt

SEQ ID NO: 893 - DNA, 24 bp, Artificial Sequence
  Description of Artificial Sequence: Synthetic oligonucleotide
  Description of Combined DNA/RNA Molecule: Synthetic oligonucleotide
  N-term hydroxyl group
  C-term hydroxyl group
  modified_base 1..1: /mod_base="OTHER" /note="GalNAc-morpholino-thymidine analog 7"
  modified_base 2..2: /mod_base="OTHER" /note="GalNAc-morpholino-thymidine analog 7"
  modified_base 3..3: /mod_base="OTHER" /note="GalNAc-morpholino-thymidine analog 7"
  modified_base 4..4: /mod_base="OTHER" /note="2'-OMe-nucleotide"
  modified_base 5..5: /mod_base="OTHER" /note="2'-OMe-nucleotide"
  modified_base 6..6: /mod_base="OTHER" /note="2'-OMe-nucleotide"
  modified_base 7..7: /mod_base="OTHER" /note="2'-OMe-nucleotide"
  modified_base 8..8: /mod_base="OTHER" /note="2'-fluoro-nucleotide"
  modified_base 9..9: /mod_base="OTHER" /note="2'-OMe-nucleotide"
  modified_base 10..10: /mod_base="OTHER" /note="2'-fluoro-nucleotide"
  modified_base 11..11: /mod_base="OTHER" /note="2'-fluoro-nucleotide"
  modified_base 12..12: /mod_base="OTHER" /note="2'-fluoro-nucleotide"
  modified_base 13..13: /mod_base="OTHER" /note="2'-OMe-nucleotide"
  modified_base 14..14: /mod_base="OTHER" /note="2'-OMe-nucleotide"
  modified_base 15..15: /mod_base="OTHER" /note="2'-OMe-nucleotide"
  modified_base 16..16: /mod_base="OTHER" /note="2'-OMe-nucleotide"
  modified_base 17..17: /mod_base="OTHER" /note="2'-OMe-nucleotide"
  modified_base 18..18: /mod_base="OTHER" /note="2'-OMe-nucleotide"
  modified_base 19..19: /mod_base="OTHER" /note="2'-OMe-nucleotide"
  modified_base 20..20: /mod_base="OTHER" /note="2'-OMe-nucleotide"
  modified_base 21..21: /mod_base="OTHER" /note="2'-OMe-nucleotide"
  modified_base 22..22: /mod_base="OTHER" /note="2'-OMe-nucleotide"
  modified_base 23..23: /mod_base="OTHER" /note="Cyclohexane-morpholino-thymidine analog 4"
  modified_base 24..24: /mod_base="OTHER" /note="Cyclohexane-morpholino-thymidine analog 4"
tttagacaauucaucauuugautt

SEQ ID NO: 894 - DNA, 24 bp, Artificial Sequence
  Description of Artificial Sequence: Synthetic oligonucleotide
  Description of Combined DNA/RNA Molecule: Synthetic oligonucleotide
  N-term hydroxyl group
  C-term hydroxyl group
  modified_base 1..1: /mod_base="OTHER" /note="GalNAc-morpholino-thymidine analog 7"
  modified_base 2..2: /mod_base="OTHER" /note="GalNAc-morpholino-thymidine analog 7"
  modified_base 3..3: /mod_base="OTHER" /note="GalNAc-morpholino-thymidine analog 7"
  modified_base 4..4: /mod_base="OTHER" /note="2'-OMe-nucleotide"
  modified_base 5..5: /mod_base="OTHER" /note="2'-OMe-nucleotide"
  modified_base 6..6: /mod_base="OTHER" /note="2'-OMe-nucleotide"
  modified_base 7..7: /mod_base="OTHER" /note="2'-OMe-nucleotide"
  modified_base 8..8: /mod_base="OTHER" /note="2'-fluoro-nucleotide"
  modified_base 9..9: /mod_base="OTHER" /note="2'-OMe-nucleotide"
  modified_base 10..10: /mod_base="OTHER" /note="2'-fluoro-nucleotide"
  modified_base 11..11: /mod_base="OTHER" /note="2'-fluoro-nucleotide"
  modified_base 12..12: /mod_base="OTHER" /note="2'-fluoro-nucleotide"
  modified_base 13..13: /mod_base="OTHER" /note="2'-OMe-nucleotide"
  modified_base 14..14: /mod_base="OTHER" /note="2'-OMe-nucleotide"
  modified_base 15..15: /mod_base="OTHER" /note="2'-OMe-nucleotide"
  modified_base 16..16: /mod_base="OTHER" /note="2'-OMe-nucleotide"
  modified_base 17..17: /mod_base="OTHER" /note="2'-OMe-nucleotide"
  modified_base 18..18: /mod_base="OTHER" /note="2'-OMe-nucleotide"
  modified_base 19..19: /mod_base="OTHER" /note="2'-OMe-nucleotide"
  modified_base 20..20: /mod_base="OTHER" /note="2'-OMe-nucleotide"
  modified_base 21..21: /mod_base="OTHER" /note="2'-OMe-nucleotide"
  modified_base 22..22: /mod_base="OTHER" /note="2'-OMe-nucleotide"
  modified_base 23..23: /mod_base="OTHER" /note="Cyclohexane-morpholino-thymidine analog 4"
  modified_base 24..24: /mod_base="OTHER" /note="Cyclohexane-morpholino-thymidine analog 4"
tttagacaauucaucauuugautt

SEQ ID NO: 895 - DNA, 24 bp, Artificial Sequence
  Description of Artificial Sequence: Synthetic oligonucleotide
  Description of Combined DNA/RNA Molecule: Synthetic oligonucleotide
  N-term hydroxyl group
  C-term hydroxyl group
  modified_base 1..1: /mod_base="OTHER" /note="GalNAc-morpholino-thymidine analog 7"
  modified_base 2..2: /mod_base="OTHER" /note="GalNAc-morpholino-thymidine analog 7"
  modified_base 3..3: /mod_base="OTHER" /note="GalNAc-morpholino-thymidine analog 7"
  modified_base 4..4: /mod_base="OTHER" /note="2'-OMe-nucleotide"
  modified_base 5..5: /mod_base="OTHER" /note="2'-OMe-nucleotide"
  modified_base 6..6: /mod_base="OTHER" /note="2'-OMe-nucleotide"
  modified_base 7..7: /mod_base="OTHER" /note="2'-OMe-nucleotide"
  modified_base 8..8: /mod_base="OTHER" /note="2'-fluoro-nucleotide"
  modified_base 9..9: /mod_base="OTHER" /note="2'-OMe-nucleotide"
  modified_base 10..10: /mod_base="OTHER" /note="2'-fluoro-nucleotide"
  modified_base 11..11: /mod_base="OTHER" /note="2'-fluoro-nucleotide"
  modified_base 12..12: /mod_base="OTHER" /note="2'-fluoro-nucleotide"
  modified_base 13..13: /mod_base="OTHER" /note="2'-OMe-nucleotide"
  modified_base 14..14: /mod_base="OTHER" /note="2'-OMe-nucleotide"
  modified_base 15..15: /mod_base="OTHER" /note="2'-OMe-nucleotide"
  modified_base 16..16: /mod_base="OTHER" /note="2'-OMe-nucleotide"
  modified_base 17..17: /mod_base="OTHER" /note="2'-OMe-nucleotide"
  modified_base 18..18: /mod_base="OTHER" /note="2'-OMe-nucleotide"
  modified_base 19..19: /mod_base="OTHER" /note="2'-OMe-nucleotide"
  modified_base 20..20: /mod_base="OTHER" /note="2'-OMe-nucleotide"
  modified_base 21..21: /mod_base="OTHER" /note="2'-OMe-nucleotide"
  modified_base 22..22: /mod_base="OTHER" /note="2'-OMe-nucleotide"
  modified_base 23..23: /mod_base="OTHER" /note="Cyclohexane-morpholino-thymidine analog 4"
  modified_base 24..24: /mod_base="OTHER" /note="Cyclohexane-morpholino-thymidine analog 4"
tttagacaauucaucauuugautt

SEQ ID NO: 896 - DNA, 24 bp, Artificial Sequence
  Description of Artificial Sequence: Synthetic oligonucleotide
  Description of Combined DNA/RNA Molecule: Synthetic oligonucleotide
  N-term hydroxyl group
  C-term hydroxyl group
  modified_base 1..1: /mod_base="OTHER" /note="GalNAc-morpholino-thymidine analog 7"
  modified_base 2..2: /mod_base="OTHER" /note="GalNAc-morpholino-thymidine analog 7"
  modified_base 3..3: /mod_base="OTHER" /note="GalNAc-morpholino-thymidine analog 7"
  modified_base 4..4: /mod_base="OTHER" /note="2'-OMe-nucleotide"
  modified_base 5..5: /mod_base="OTHER" /note="2'-OMe-nucleotide"
  modified_base 6..6: /mod_base="OTHER" /note="2'-OMe-nucleotide"
  modified_base 7..7: /mod_base="OTHER" /note="2'-OMe-nucleotide"
  modified_base 8..8: /mod_base="OTHER" /note="2'-fluoro-nucleotide"
  modified_base 9..9: /mod_base="OTHER" /note="2'-OMe-nucleotide"
  modified_base 10..10: /mod_base="OTHER" /note="2'-fluoro-nucleotide"
  modified_base 11..11: /mod_base="OTHER" /note="2'-fluoro-nucleotide"
  modified_base 12..12: /mod_base="OTHER" /note="2'-fluoro-nucleotide"
  modified_base 13..13: /mod_base="OTHER" /note="2'-OMe-nucleotide"
  modified_base 14..14: /mod_base="OTHER" /note="2'-OMe-nucleotide"
  modified_base 15..15: /mod_base="OTHER" /note="2'-OMe-nucleotide"
  modified_base 16..16: /mod_base="OTHER" /note="2'-OMe-nucleotide"
  modified_base 17..17: /mod_base="OTHER" /note="2'-OMe-nucleotide"
  modified_base 18..18: /mod_base="OTHER" /note="2'-OMe-nucleotide"
  modified_base 19..19: /mod_base="OTHER" /note="2'-OMe-nucleotide"
  modified_base 20..20: /mod_base="OTHER" /note="2'-OMe-nucleotide"
  modified_base 21..21: /mod_base="OTHER" /note="2'-OMe-nucleotide"
  modified_base 22..22: /mod_base="OTHER" /note="2'-OMe-nucleotide"
  modified_base 23..23: /mod_base="OTHER" /note="Cyclohexane-morpholino-thymidine analog 4"
  modified_base 24..24: /mod_base="OTHER" /note="Cyclohexane-morpholino-thymidine analog 4"
tttagacaauucaucauuugautt

SEQ ID NO: 897 - DNA, 24 bp, Artificial Sequence
  Description of Artificial Sequence: Synthetic oligonucleotide
  Description of Combined DNA/RNA Molecule: Synthetic oligonucleotide
  N-term hydroxyl group
  C-term hydroxyl group
  modified_base 1..1: /mod_base="OTHER" /note="GalNAc-morpholino-thymidine analog 7"
  modified_base 2..2: /mod_base="OTHER" /note="GalNAc-morpholino-thymidine analog 7"
  modified_base 3..3: /mod_base="OTHER" /note="GalNAc-morpholino-thymidine analog 7"
  modified_base 4..4: /mod_base="OTHER" /note="Locked nucleic acid (LNA) nucleotide"
  modified_base 5..5: /mod_base="OTHER" /note="Locked nucleic acid (LNA) nucleotide"
  modified_base 6..6: /mod_base="OTHER" /note="2'-OMe-nucleotide"
  modified_base 7..7: /mod_base="OTHER" /note="2'-OMe-nucleotide"
  modified_base 8..8: /mod_base="OTHER" /note="2'-fluoro-nucleotide"
  modified_base 9..9: /mod_base="OTHER" /note="2'-OMe-nucleotide"
  modified_base 10..10: /mod_base="OTHER" /note="2'-fluoro-nucleotide"
  modified_base 11..11: /mod_base="OTHER" /note="2'-fluoro-nucleotide"
  modified_base 12..12: /mod_base="OTHER" /note="2'-fluoro-nucleotide"
  modified_base 13..13: /mod_base="OTHER" /note="2'-OMe-nucleotide"
  modified_base 14..14: /mod_base="OTHER" /note="2'-OMe-nucleotide"
  modified_base 15..15: /mod_base="OTHER" /note="2'-OMe-nucleotide"
  modified_base 16..16: /mod_base="OTHER" /note="2'-OMe-nucleotide"
  modified_base 17..17: /mod_base="OTHER" /note="2'-OMe-nucleotide"
  modified_base 18..18: /mod_base="OTHER" /note="2'-OMe-nucleotide"
  modified_base 19..19: /mod_base="OTHER" /note="2'-OMe-nucleotide"
  modified_base 20..20: /mod_base="OTHER" /note="2'-OMe-nucleotide"
  modified_base 21..21: /mod_base="OTHER" /note="2'-OMe-nucleotide"
  modified_base 22..22: /mod_base="OTHER" /note="2'-OMe-nucleotide"
  modified_base 23..23: /mod_base="OTHER" /note="Cyclohexane-morpholino-thymidine analog 4"
  modified_base 24..24: /mod_base="OTHER" /note="Cyclohexane-morpholino-thymidine analog 4"
tttagacaauucaucauuugautt

SEQ ID NO: 898 - DNA, 24 bp, Artificial Sequence
  Description of Artificial Sequence: Synthetic oligonucleotide
  Description of Combined DNA/RNA Molecule: Synthetic oligonucleotide
  N-term hydroxyl group
  C-term hydroxyl group
  modified_base 1..1: /mod_base="OTHER" /note="GalNAc-morpholino-thymidine analog 7"
  modified_base 2..2: /mod_base="OTHER" /note="GalNAc-morpholino-thymidine analog 7"
  modified_base 3..3: /mod_base="OTHER" /note="GalNAc-morpholino-thymidine analog 7"
  modified_base 4..4: /mod_base="OTHER" /note="Locked nucleic acid (LNA) nucleotide"
  modified_base 5..5: /mod_base="OTHER" /note="Locked nucleic acid (LNA) nucleotide"
  modified_base 6..6: /mod_base="OTHER" /note="2'-OMe-nucleotide"
  modified_base 7..7: /mod_base="OTHER" /note="2'-OMe-nucleotide"
  modified_base 8..8: /mod_base="OTHER" /note="2'-fluoro-nucleotide"
  modified_base 9..9: /mod_base="OTHER" /note="2'-OMe-nucleotide"
  modified_base 10..10: /mod_base="OTHER" /note="2'-fluoro-nucleotide"
  modified_base 11..11: /mod_base="OTHER" /note="2'-fluoro-nucleotide"
  modified_base 12..12: /mod_base="OTHER" /note="2'-fluoro-nucleotide"
  modified_base 13..13: /mod_base="OTHER" /note="2'-OMe-nucleotide"
  modified_base 14..14: /mod_base="OTHER" /note="2'-OMe-nucleotide"
  modified_base 15..15: /mod_base="OTHER" /note="2'-OMe-nucleotide"
  modified_base 16..16: /mod_base="OTHER" /note="2'-OMe-nucleotide"
  modified_base 17..17: /mod_base="OTHER" /note="2'-OMe-nucleotide"
  modified_base 18..18: /mod_base="OTHER" /note="2'-OMe-nucleotide"
  modified_base 19..19: /mod_base="OTHER" /note="2'-OMe-nucleotide"
  modified_base 20..20: /mod_base="OTHER" /note="2'-OMe-nucleotide"
  modified_base 21..21: /mod_base="OTHER" /note="2'-OMe-nucleotide"
  modified_base 22..22: /mod_base="OTHER" /note="2'-OMe-nucleotide"
  modified_base 23..23: /mod_base="OTHER" /note="Cyclohexane-morpholino-thymidine analog 4"
  modified_base 24..24: /mod_base="OTHER" /note="Cyclohexane-morpholino-thymidine analog 4"
tttagacaauucaucauuugautt

SEQ ID NO: 899 - DNA, 24 bp, Artificial Sequence
  Description of Artificial Sequence: Synthetic oligonucleotide
  Description of Combined DNA/RNA Molecule: Synthetic oligonucleotide
  N-term hydroxyl group
  C-term hydroxyl group
  modified_base 1..1: /mod_base="OTHER" /note="GalNAc-morpholino-thymidine analog 7"
  modified_base 2..2: /mod_base="OTHER" /note="GalNAc-morpholino-thymidine analog 7"
  modified_base 3..3: /mod_base="OTHER" /note="GalNAc-morpholino-thymidine analog 7"
  modified_base 4..4: /mod_base="OTHER" /note="Locked nucleic acid (LNA) nucleotide"
  modified_base 5..5: /mod_base="OTHER" /note="Locked nucleic acid (LNA) nucleotide"
  modified_base 6..6: /mod_base="OTHER" /note="2'-OMe-nucleotide"
  modified_base 7..7: /mod_base="OTHER" /note="2'-OMe-nucleotide"
  modified_base 8..8: /mod_base="OTHER" /note="2'-fluoro-nucleotide"
  modified_base 9..9: /mod_base="OTHER" /note="2'-OMe-nucleotide"
  modified_base 10..10: /mod_base="OTHER" /note="2'-fluoro-nucleotide"
  modified_base 11..11: /mod_base="OTHER" /note="2'-fluoro-nucleotide"
  modified_base 12..12: /mod_base="OTHER" /note="2'-fluoro-nucleotide"
  modified_base 13..13: /mod_base="OTHER" /note="2'-OMe-nucleotide"
  modified_base 14..14: /mod_base="OTHER" /note="2'-OMe-nucleotide"
  modified_base 15..15: /mod_base="OTHER" /note="2'-OMe-nucleotide"
  modified_base 16..16: /mod_base="OTHER" /note="2'-OMe-nucleotide"
  modified_base 17..17: /mod_base="OTHER" /note="2'-OMe-nucleotide"
  modified_base 18..18: /mod_base="OTHER" /note="2'-OMe-nucleotide"
  modified_base 19..19: /mod_base="OTHER" /note="2'-OMe-nucleotide"
  modified_base 20..20: /mod_base="OTHER" /note="2'-OMe-nucleotide"
  modified_base 21..21: /mod_base="OTHER" /note="2'-OMe-nucleotide"
  modified_base 22..22: /mod_base="OTHER" /note="2'-OMe-nucleotide"
  modified_base 23..23: /mod_base="OTHER" /note="Cyclohexane-morpholino-thymidine analog 4"
  modified_base 24..24: /mod_base="OTHER" /note="Cyclohexane-morpholino-thymidine analog 4"
tttagacaauucaucauuugautt

SEQ ID NO: 900 - DNA, 24 bp, Artificial Sequence
  Description of Artificial Sequence: Synthetic oligonucleotide
  Description of Combined DNA/RNA Molecule: Synthetic oligonucleotide
  N-term hydroxyl group
  C-term hydroxyl group
  modified_base 1..1: /mod_base="OTHER" /note="GalNAc-morpholino-thymidine analog 7"
  modified_base 2..2: /mod_base="OTHER" /note="GalNAc-morpholino-thymidine analog 7"
  modified_base 3..3: /mod_base="OTHER" /note="GalNAc-morpholino-thymidine analog 7"
  modified_base 4..4: /mod_base="OTHER" /note="Locked nucleic acid (LNA) nucleotide"
  modified_base 5..5: /mod_base="OTHER" /note="Locked nucleic acid (LNA) nucleotide"
  modified_base 6..6: /mod_base="OTHER" /note="2'-OMe-nucleotide"
  modified_base 7..7: /mod_base="OTHER" /note="2'-OMe-nucleotide"
  modified_base 8..8: /mod_base="OTHER" /note="2'-fluoro-nucleotide"
  modified_base 9..9: /mod_base="OTHER" /note="2'-OMe-nucleotide"
  modified_base 10..10: /mod_base="OTHER" /note="2'-fluoro-nucleotide"
  modified_base 11..11: /mod_base="OTHER" /note="2'-fluoro-nucleotide"
  modified_base 12..12: /mod_base="OTHER" /note="2'-fluoro-nucleotide"
  modified_base 13..13: /mod_base="OTHER" /note="2'-OMe-nucleotide"
  modified_base 14..14: /mod_base="OTHER" /note="2'-OMe-nucleotide"
  modified_base 15..15: /mod_base="OTHER" /note="2'-OMe-nucleotide"
  modified_base 16..16: /mod_base="OTHER" /note="2'-OMe-nucleotide"
  modified_base 17..17: /mod_base="OTHER" /note="2'-OMe-nucleotide"
  modified_base 18..18: /mod_base="OTHER" /note="2'-OMe-nucleotide"
  modified_base 19..19: /mod_base="OTHER" /note="2'-OMe-nucleotide"
  modified_base 20..20: /mod_base="OTHER" /note="2'-OMe-nucleotide"
  modified_base 21..21: /mod_base="OTHER" /note="2'-OMe-nucleotide"
  modified_base 22..22: /mod_base="OTHER" /note="2'-OMe-nucleotide"
  modified_base 23..23: /mod_base="OTHER" /note="Cyclohexane-morpholino-thymidine analog 4"
  modified_base 24..24: /mod_base="OTHER" /note="Cyclohexane-morpholino-thymidine analog 4"
tttagacaauucaucauuugautt

SEQ ID NO: 901 - DNA, 24 bp, Artificial Sequence
  Description of Artificial Sequence: Synthetic oligonucleotide
  Description of Combined DNA/RNA Molecule: Synthetic oligonucleotide
  N-term hydroxyl group
  C-term hydroxyl group
  modified_base 1..1: /mod_base="OTHER" /note="GalNAc-morpholino-thymidine analog 7"
  modified_base 2..2: /mod_base="OTHER" /note="GalNAc-morpholino-thymidine analog 7"
  modified_base 3..3: /mod_base="OTHER" /note="GalNAc-morpholino-thymidine analog 7"
  modified_base 4..4: /mod_base="OTHER" /note="2'-OMe-nucleotide"
  modified_base 5..5: /mod_base="OTHER" /note="2'-OMe-nucleotide"
  modified_base 6..6: /mod_base="OTHER" /note="2'-OMe-nucleotide"
  modified_base 7..7: /mod_base="OTHER" /note="2'-OMe-nucleotide"
  modified_base 8..8: /mod_base="OTHER" /note="2'-fluoro-nucleotide"
  modified_base 9..9: /mod_base="OTHER" /note="2'-OMe-nucleotide"
  modified_base 10..10: /mod_base="OTHER" /note="2'-fluoro-nucleotide"
  modified_base 11..11: /mod_base="OTHER" /note="2'-OMe-nucleotide"
  modified_base 12..12: /mod_base="OTHER" /note="2'-fluoro-nucleotide"
  modified_base 13..13: /mod_base="OTHER" /note="2'-fluoro-nucleotide"
  modified_base 14..14: /mod_base="OTHER" /note="2'-fluoro-nucleotide"
  modified_base 15..15: /mod_base="OTHER" /note="2'-OMe-nucleotide"
  modified_base 16..16: /mod_base="OTHER" /note="2'-OMe-nucleotide"
  modified_base 17..17: /mod_base="OTHER" /note="2'-OMe-nucleotide"
  modified_base 18..18: /mod_base="OTHER" /note="2'-OMe-nucleotide"
  modified_base 19..19: /mod_base="OTHER" /note="2'-OMe-nucleotide"
  modified_base 20..20: /mod_base="OTHER" /note="2'-OMe-nucleotide"
  modified_base 21..21: /mod_base="OTHER" /note="2'-OMe-nucleotide"
  modified_base 22..22: /mod_base="OTHER" /note="2'-OMe-nucleotide"
  modified_base 23..23: /mod_base="OTHER" /note="Cyclohexane-morpholino-thymidine analog 4"
  modified_base 24..24: /mod_base="OTHER" /note="Cyclohexane-morpholino-thymidine analog 4"
tttagacaauucaucauuugautt

SEQ ID NO: 902 - DNA, 24 bp, Artificial Sequence
  Description of Artificial Sequence: Synthetic oligonucleotide
  Description of Combined DNA/RNA Molecule: Synthetic oligonucleotide
  N-term hydroxyl group
  C-term hydroxyl group
  modified_base 1..1: /mod_base="OTHER" /note="GalNAc-morpholino-thymidine analog 7"
  modified_base 2..2: /mod_base="OTHER" /note="GalNAc-morpholino-thymidine analog 7"
  modified_base 3..3: /mod_base="OTHER" /note="GalNAc-morpholino-thymidine analog 7"
  modified_base 4..4: /mod_base="OTHER" /note="2'-OMe-nucleotide"
  modified_base 5..5: /mod_base="OTHER" /note="2'-OMe-nucleotide"
  modified_base 6..6: /mod_base="OTHER" /note="2'-OMe-nucleotide"
  modified_base 7..7: /mod_base="OTHER" /note="2'-OMe-nucleotide"
  modified_base 8..8: /mod_base="OTHER" /note="2'-fluoro-nucleotide"
  modified_base 9..9: /mod_base="OTHER" /note="2'-OMe-nucleotide"
  modified_base 10..10: /mod_base="OTHER" /note="2'-fluoro-nucleotide"
  modified_base 11..11: /mod_base="OTHER" /note="2'-OMe-nucleotide"
  modified_base 12..12: /mod_base="OTHER" /note="2'-fluoro-nucleotide"
  modified_base 13..13: /mod_base="OTHER" /note="2'-fluoro-nucleotide"
  modified_base 14..14: /mod_base="OTHER" /note="2'-fluoro-nucleotide"
  modified_base 15..15: /mod_base="OTHER" /note="2'-OMe-nucleotide"
  modified_base 16..16: /mod_base="OTHER" /note="2'-OMe-nucleotide"
  modified_base 17..17: /mod_base="OTHER" /note="2'-OMe-nucleotide"
  modified_base 18..18: /mod_base="OTHER" /note="2'-OMe-nucleotide"
  modified_base 19..19: /mod_base="OTHER" /note="2'-OMe-nucleotide"
  modified_base 20..20: /mod_base="OTHER" /note="2'-OMe-nucleotide"
  modified_base 21..21: /mod_base="OTHER" /note="2'-OMe-nucleotide"
  modified_base 22..22: /mod_base="OTHER" /note="2'-OMe-nucleotide"
  modified_base 23..23: /mod_base="OTHER" /note="Cyclohexane-morpholino-thymidine analog 4"
  modified_base 24..24: /mod_base="OTHER" /note="Cyclohexane-morpholino-thymidine analog 4"
tttagacaauucaucauuugautt

SEQ ID NO: 903 - DNA, 24 bp, Artificial Sequence
  Description of Artificial Sequence: Synthetic oligonucleotide
  Description of Combined DNA/RNA Molecule: Synthetic oligonucleotide
  N-term hydroxyl group
  C-term hydroxyl group
  modified_base 1..1: /mod_base="OTHER" /note="GalNAc-morpholino-thymidine analog 7"
  modified_base 2..2: /mod_base="OTHER" /note="GalNAc-morpholino-thymidine analog 7"
  modified_base 3..3: /mod_base="OTHER" /note="GalNAc-morpholino-thymidine analog 7"
  modified_base 4..4: /mod_base="OTHER" /note="2'-OMe-nucleotide"
  modified_base 5..5: /mod_base="OTHER" /note="2'-OMe-nucleotide"
  modified_base 6..6: /mod_base="OTHER" /note="2'-OMe-nucleotide"
  modified_base 7..7: /mod_base="OTHER" /note="2'-OMe-nucleotide"
  modified_base 8..8: /mod_base="OTHER" /note="2'-fluoro-nucleotide"
  modified_base 9..9: /mod_base="OTHER" /note="2'-OMe-nucleotide"
  modified_base 10..10: /mod_base="OTHER" /note="2'-fluoro-nucleotide"
  modified_base 11..11: /mod_base="OTHER" /note="2'-OMe-nucleotide"
  modified_base 12..12: /mod_base="OTHER" /note="2'-fluoro-nucleotide"
  modified_base 13..13: /mod_base="OTHER" /note="2'-fluoro-nucleotide"
  modified_base 14..14: /mod_base="OTHER" /note="2'-fluoro-nucleotide"
  modified_base 15..15: /mod_base="OTHER" /note="2'-OMe-nucleotide"
  modified_base 16..16: /mod_base="OTHER" /note="2'-OMe-nucleotide"
  modified_base 17..17: /mod_base="OTHER" /note="2'-OMe-nucleotide"
  modified_base 18..18: /mod_base="OTHER" /note="2'-OMe-nucleotide"
  modified_base 19..19: /mod_base="OTHER" /note="2'-OMe-nucleotide"
  modified_base 20..20: /mod_base="OTHER" /note="2'-OMe-nucleotide"
  modified_base 21..21: /mod_base="OTHER" /note="2'-OMe-nucleotide"
  modified_base 22..22: /mod_base="OTHER" /note="2'-OMe-nucleotide"
  modified_base 23..23: /mod_base="OTHER" /note="Cyclohexane-morpholino-thymidine analog 4"
  modified_base 24..24: /mod_base="OTHER" /note="Cyclohexane-morpholino-thymidine analog 4"
tttagacaauucaucauuugautt

SEQ ID NO: 904 - DNA, 24 bp, Artificial Sequence
  Description of Artificial Sequence: Synthetic oligonucleotide
  Description of Combined DNA/RNA Molecule: Synthetic oligonucleotide
  N-term hydroxyl group
  C-term hydroxyl group
  modified_base 1..1: /mod_base="OTHER" /note="GalNAc-morpholino-thymidine analog 7"
  modified_base 2..2: /mod_base="OTHER" /note="GalNAc-morpholino-thymidine analog 7"
  modified_base 3..3: /mod_base="OTHER" /note="GalNAc-morpholino-thymidine analog 7"
  modified_base 4..4: /mod_base="OTHER" /note="2'-OMe-nucleotide"
  modified_base 5..5: /mod_base="OTHER" /note="2'-OMe-nucleotide"
  modified_base 6..6: /mod_base="OTHER" /note="2'-OMe-nucleotide"
  modified_base 7..7: /mod_base="OTHER" /note="2'-OMe-nucleotide"
  modified_base 8..8: /mod_base="OTHER" /note="2'-fluoro-nucleotide"
  modified_base 9..9: /mod_base="OTHER" /note="2'-OMe-nucleotide"
  modified_base 10..10: /mod_base="OTHER" /note="2'-fluoro-nucleotide"
  modified_base 11..11: /mod_base="OTHER" /note="2'-OMe-nucleotide"
  modified_base 12..12: /mod_base="OTHER" /note="2'-fluoro-nucleotide"
  modified_base 13..13: /mod_base="OTHER" /note="2'-fluoro-nucleotide"
  modified_base 14..14: /mod_base="OTHER" /note="2'-fluoro-nucleotide"
  modified_base 15..15: /mod_base="OTHER" /note="2'-OMe-nucleotide"
  modified_base 16..16: /mod_base="OTHER" /note="2'-OMe-nucleotide"
  modified_base 17..17: /mod_base="OTHER" /note="2'-OMe-nucleotide"
  modified_base 18..18: /mod_base="OTHER" /note="2'-OMe-nucleotide"
  modified_base 19..19: /mod_base="OTHER" /note="2'-OMe-nucleotide"
  modified_base 20..20: /mod_base="OTHER" /note="2'-OMe-nucleotide"
  modified_base 21..21: /mod_base="OTHER" /note="2'-OMe-nucleotide"
  modified_base 22..22: /mod_base="OTHER" /note="2'-OMe-nucleotide"
  modified_base 23..23: /mod_base="OTHER" /note="Cyclohexane-morpholino-thymidine analog 4"
  modified_base 24..24: /mod_base="OTHER" /note="Cyclohexane-morpholino-thymidine analog 4"
tttagacaauucaucauuugautt

SEQ ID NO: 905 - DNA, 24 bp, Artificial Sequence
  Description of Artificial Sequence: Synthetic oligonucleotide
  Description of Combined DNA/RNA Molecule: Synthetic oligonucleotide
  N-term hydroxyl group
  C-term hydroxyl group
  modified_base 1..1: /mod_base="OTHER" /note="GalNAc-morpholino-thymidine analog 7"
  modified_base 2..2: /mod_base="OTHER" /note="GalNAc-morpholino-thymidine analog 7"
  modified_base 3..3: /mod_base="OTHER" /note="GalNAc-morpholino-thymidine analog 7"
  modified_base 4..4: /mod_base="OTHER" /note="2'-OMe-nucleotide"
  modified_base 5..5: /mod_base="OTHER" /note="2'-OMe-nucleotide"
  modified_base 6..6: /mod_base="OTHER" /note="2'-OMe-nucleotide"
  modified_base 7..7: /mod_base="OTHER" /note="2'-OMe-nucleotide"
  modified_base 8..8: /mod_base="OTHER" /note="2'-fluoro-nucleotide"
  modified_base 9..9: /mod_base="OTHER" /note="2'-OMe-nucleotide"
  modified_base 10..10: /mod_base="OTHER" /note="2'-fluoro-nucleotide"
  modified_base 11..11: /mod_base="OTHER" /note="2'-OMe-nucleotide"
  modified_base 12..12: /mod_base="OTHER" /note="2'-fluoro-nucleotide"
  modified_base 13..13: /mod_base="OTHER" /note="2'-fluoro-nucleotide"
  modified_base 14..14: /mod_base="OTHER" /note="2'-fluoro-nucleotide"
  modified_base 15..15: /mod_base="OTHER" /note="2'-OMe-nucleotide"
  modified_base 16..16: /mod_base="OTHER" /note="2'-OMe-nucleotide"
  modified_base 17..17: /mod_base="OTHER" /note="2'-OMe-nucleotide"
  modified_base 18..18: /mod_base="OTHER" /note="2'-OMe-nucleotide"
  modified_base 19..19: /mod_base="OTHER" /note="2'-OMe-nucleotide"
  modified_base 20..20: /mod_base="OTHER" /note="2'-OMe-nucleotide"
  modified_base 21..21: /mod_base="OTHER" /note="2'-OMe-nucleotide"
  modified_base 22..22: /mod_base="OTHER" /note="2'-OMe-nucleotide"
  modified_base 23..23: /mod_base="OTHER" /note="Cyclohexane-morpholino-thymidine analog 4"
  modified_base 24..24: /mod_base="OTHER" /note="Cyclohexane-morpholino-thymidine analog 4"
tttagacaauucaucauuugautt

SEQ ID NO: 906 - DNA, 24 bp, Artificial Sequence
  Description of Artificial Sequence: Synthetic oligonucleotide
  Description of Combined DNA/RNA Molecule: Synthetic oligonucleotide
  N-term hydroxyl group
  C-term hydroxyl group
  modified_base 1..1: /mod_base="OTHER" /note="GalNAc-morpholino-thymidine analog 7"
  modified_base 2..2: /mod_base="OTHER" /note="GalNAc-morpholino-thymidine analog 7"
  modified_base 3..3: /mod_base="OTHER" /note="GalNAc-morpholino-thymidine analog 7"
  modified_base 4..4: /mod_base="OTHER" /note="Locked nucleic acid (LNA) nucleotide"
  modified_base 5..5: /mod_base="OTHER" /note="Locked nucleic acid (LNA) nucleotide"
  modified_base 6..6: /mod_base="OTHER" /note="2'-OMe-nucleotide"
  modified_base 7..7: /mod_base="OTHER" /note="2'-OMe-nucleotide"
  modified_base 8..8: /mod_base="OTHER" /note="2'-fluoro-nucleotide"
  modified_base 9..9: /mod_base="OTHER" /note="2'-OMe-nucleotide"
  modified_base 10..10: /mod_base="OTHER" /note="2'-fluoro-nucleotide"
  modified_base 11..11: /mod_base="OTHER" /note="2'-OMe-nucleotide"
  modified_base 12..12: /mod_base="OTHER" /note="2'-fluoro-nucleotide"
  modified_base 13..13: /mod_base="OTHER" /note="2'-fluoro-nucleotide"
  modified_base 14..14: /mod_base="OTHER" /note="2'-fluoro-nucleotide"
  modified_base 15..15: /mod_base="OTHER" /note="2'-OMe-nucleotide"
  modified_base 16..16: /mod_base="OTHER" /note="2'-OMe-nucleotide"
  modified_base 17..17: /mod_base="OTHER" /note="2'-OMe-nucleotide"
  modified_base 18..18: /mod_base="OTHER" /note="2'-OMe-nucleotide"
  modified_base 19..19: /mod_base="OTHER" /note="2'-OMe-nucleotide"
  modified_base 20..20: /mod_base="OTHER" /note="2'-OMe-nucleotide"
  modified_base 21..21: /mod_base="OTHER" /note="2'-OMe-nucleotide"
  modified_base 22..22: /mod_base="OTHER" /note="2'-OMe-nucleotide"
  modified_base 23..23: /mod_base="OTHER" /note="Cyclohexane-morpholino-thymidine analog 4"
  modified_base 24..24: /mod_base="OTHER" /note="Cyclohexane-morpholino-thymidine analog 4"
tttagacaauucaucauuugautt

SEQ ID NO: 907 - DNA, 24 bp, Artificial Sequence
  Description of Artificial Sequence: Synthetic oligonucleotide
  Description of Combined DNA/RNA Molecule: Synthetic oligonucleotide
  N-term hydroxyl group
  C-term hydroxyl group
  modified_base 1..1: /mod_base="OTHER" /note="GalNAc-morpholino-thymidine analog 7"
  modified_base 2..2: /mod_base="OTHER" /note="GalNAc-morpholino-thymidine analog 7"
  modified_base 3..3: /mod_base="OTHER" /note="GalNAc-morpholino-thymidine analog 7"
  modified_base 4..4: /mod_base="OTHER" /note="Locked nucleic acid (LNA) nucleotide"
  modified_base 5..5: /mod_base="OTHER" /note="Locked nucleic acid (LNA) nucleotide"
  modified_base 6..6: /mod_base="OTHER" /note="2'-OMe-nucleotide"
  modified_base 7..7: /mod_base="OTHER" /note="2'-OMe-nucleotide"
  modified_base 8..8: /mod_base="OTHER" /note="2'-fluoro-nucleotide"
  modified_base 9..9: /mod_base="OTHER" /note="2'-OMe-nucleotide"
  modified_base 10..10: /mod_base="OTHER" /note="2'-fluoro-nucleotide"
  modified_base 11..11: /mod_base="OTHER" /note="2'-OMe-nucleotide"
  modified_base 12..12: /mod_base="OTHER" /note="2'-fluoro-nucleotide"
  modified_base 13..13: /mod_base="OTHER" /note="2'-fluoro-nucleotide"
  modified_base 14..14: /mod_base="OTHER" /note="2'-fluoro-nucleotide"
  modified_base 15..15: /mod_base="OTHER" /note="2'-OMe-nucleotide"
  modified_base 16..16: /mod_base="OTHER" /note="2'-OMe-nucleotide"
  modified_base 17..17: /mod_base="OTHER" /note="2'-OMe-nucleotide"
  modified_base 18..18: /mod_base="OTHER" /note="2'-OMe-nucleotide"
  modified_base 19..19: /mod_base="OTHER" /note="2'-OMe-nucleotide"
  modified_base 20..20: /mod_base="OTHER" /note="2'-OMe-nucleotide"
  modified_base 21..21: /mod_base="OTHER" /note="2'-OMe-nucleotide"
  modified_base 22..22: /mod_base="OTHER" /note="2'-OMe-nucleotide"
  modified_base 23..23: /mod_base="OTHER" /note="Cyclohexane-morpholino-thymidine analog 4"
  modified_base 24..24: /mod_base="OTHER" /note="Cyclohexane-morpholino-thymidine analog 4"
tttagacaauucaucauuugautt

SEQ ID NO: 908 - DNA, 24 bp, Artificial Sequence
  Description of Artificial Sequence: Synthetic oligonucleotide
  Description of Combined DNA/RNA Molecule: Synthetic oligonucleotide
  N-term hydroxyl group
  C-term hydroxyl group
  modified_base 1..1: /mod_base="OTHER" /note="GalNAc-morpholino-thymidine analog 7"
  modified_base 2..2: /mod_base="OTHER" /note="GalNAc-morpholino-thymidine analog 7"
  modified_base 3..3: /mod_base="OTHER" /note="GalNAc-morpholino-thymidine analog 7"
  modified_base 4..4: /mod_base="OTHER" /note="Locked nucleic acid (LNA) nucleotide"
  modified_base 5..5: /mod_base="OTHER" /note="Locked nucleic acid (LNA) nucleotide"
  modified_base 6..6: /mod_base="OTHER" /note="2'-OMe-nucleotide"
  modified_base 7..7: /mod_base="OTHER" /note="2'-OMe-nucleotide"
  modified_base 8..8: /mod_base="OTHER" /note="2'-fluoro-nucleotide"
  modified_base 9..9: /mod_base="OTHER" /note="2'-OMe-nucleotide"
  modified_base 10..10: /mod_base="OTHER" /note="2'-fluoro-nucleotide"
  modified_base 11..11: /mod_base="OTHER" /note="2'-OMe-nucleotide"
  modified_base 12..12: /mod_base="OTHER" /note="2'-fluoro-nucleotide"
  modified_base 13..13: /mod_base="OTHER" /note="2'-fluoro-nucleotide"
  modified_base 14..14: /mod_base="OTHER" /note="2'-fluoro-nucleotide"
  modified_base 15..15: /mod_base="OTHER" /note="2'-OMe-nucleotide"
  modified_base 16..16: /mod_base="OTHER" /note="2'-OMe-nucleotide"
  modified_base 17..17: /mod_base="OTHER" /note="2'-OMe-nucleotide"
  modified_base 18..18: /mod_base="OTHER" /note="2'-OMe-nucleotide"
  modified_base 19..19: /mod_base="OTHER" /note="2'-OMe-nucleotide"
  modified_base 20..20: /mod_base="OTHER" /note="2'-OMe-nucleotide"
  modified_base 21..21: /mod_base="OTHER" /note="2'-OMe-nucleotide"
  modified_base 22..22: /mod_base="OTHER" /note="2'-OMe-nucleotide"
  modified_base 23..23: /mod_base="OTHER" /note="Cyclohexane-morpholino-thymidine analog 4"
  modified_base 24..24: /mod_base="OTHER" /note="Cyclohexane-morpholino-thymidine analog 4"
tttagacaauucaucauuugautt

SEQ ID NO: 909 - DNA, 24 bp, Artificial Sequence
  Description of Artificial Sequence: Synthetic oligonucleotide
  Description of Combined DNA/RNA Molecule: Synthetic oligonucleotide
  N-term hydroxyl group
  C-term hydroxyl group
  modified_base 1..1: /mod_base="OTHER" /note="GalNAc-morpholino-thymidine analog 7"
  modified_base 2..2: /mod_base="OTHER" /note="GalNAc-morpholino-thymidine analog 7"
  modified_base 3..3: /mod_base="OTHER" /note="GalNAc-morpholino-thymidine analog 7"
  modified_base 4..4: /mod_base="OTHER" /note="Locked nucleic acid (LNA) nucleotide"
  modified_base 5..5: /mod_base="OTHER" /note="Locked nucleic acid (LNA) nucleotide"
  modified_base 6..6: /mod_base="OTHER" /note="2'-OMe-nucleotide"
  modified_base 7..7: /mod_base="OTHER" /note="2'-OMe-nucleotide"
  modified_base 8..8: /mod_base="OTHER" /note="2'-fluoro-nucleotide"
  modified_base 9..9: /mod_base="OTHER" /note="2'-OMe-nucleotide"
  modified_base 10..10: /mod_base="OTHER" /note="2'-fluoro-nucleotide"
  modified_base 11..11: /mod_base="OTHER" /note="2'-OMe-nucleotide"
  modified_base 12..12: /mod_base="OTHER" /note="2'-fluoro-nucleotide"
  modified_base 13..13: /mod_base="OTHER" /note="2'-fluoro-nucleotide"
  modified_base 14..14: /mod_base="OTHER" /note="2'-fluoro-nucleotide"
  modified_base 15..15: /mod_base="OTHER" /note="2'-OMe-nucleotide"
  modified_base 16..16: /mod_base="OTHER" /note="2'-OMe-nucleotide"
  modified_base 17..17: /mod_base="OTHER" /note="2'-OMe-nucleotide"
  modified_base 18..18: /mod_base="OTHER" /note="2'-OMe-nucleotide"
  modified_base 19..19: /mod_base="OTHER" /note="2'-OMe-nucleotide"
  modified_base 20..20: /mod_base="OTHER" /note="2'-OMe-nucleotide"
  modified_base 21..21: /mod_base="OTHER" /note="2'-OMe-nucleotide"
  modified_base 22..22: /mod_base="OTHER" /note="2'-OMe-nucleotide"
  modified_base 23..23: /mod_base="OTHER" /note="Cyclohexane-morpholino-thymidine analog 4"
  modified_base 24..24: /mod_base="OTHER" /note="Cyclohexane-morpholino-thymidine analog 4"
tttagacaauucaucauuugautt

SEQ ID NO: 910 - DNA, 24 bp, Artificial Sequence
  Description of Artificial Sequence: Synthetic oligonucleotide
  Description of Combined DNA/RNA Molecule: Synthetic oligonucleotide
  N-term hydroxyl group
  C-term hydroxyl group
  modified_base 1..1: /mod_base="OTHER" /note="GalNAc-morpholino-thymidine analog 7"
  modified_base 2..2: /mod_base="OTHER" /note="GalNAc-morpholino-thymidine analog 7"
  modified_base 3..3: /mod_base="OTHER" /note="GalNAc-morpholino-thymidine analog 7"
  modified_base 4..4: /mod_base="OTHER" /note="Locked nucleic acid (LNA) nucleotide"
  modified_base 5..5: /mod_base="OTHER" /note="Locked nucleic acid (LNA) nucleotide"
  modified_base 6..6: /mod_base="OTHER" /note="2'-OMe-nucleotide"
  modified_base 7..7: /mod_base="OTHER" /note="2'-OMe-nucleotide"
  modified_base 8..8: /mod_base="OTHER" /note="2'-fluoro-nucleotide"
  modified_base 9..9: /mod_base="OTHER" /note="2'-OMe-nucleotide"
  modified_base 10..10: /mod_base="OTHER" /note="2'-fluoro-nucleotide"
  modified_base 11..11: /mod_base="OTHER" /note="2'-OMe-nucleotide"
  modified_base 12..12: /mod_base="OTHER" /note="2'-fluoro-nucleotide"
  modified_base 13..13: /mod_base="OTHER" /note="2'-fluoro-nucleotide"
  modified_base 14..14: /mod_base="OTHER" /note="2'-fluoro-nucleotide"
  modified_base 15..15: /mod_base="OTHER" /note="2'-OMe-nucleotide"
  modified_base 16..16: /mod_base="OTHER" /note="2'-OMe-nucleotide"
  modified_base 17..17: /mod_base="OTHER" /note="2'-OMe-nucleotide"
  modified_base 18..18: /mod_base="OTHER" /note="2'-OMe-nucleotide"
  modified_base 19..19: /mod_base="OTHER" /note="2'-OMe-nucleotide"
  modified_base 20..20: /mod_base="OTHER" /note="2'-OMe-nucleotide"
  modified_base 21..21: /mod_base="OTHER" /note="2'-OMe-nucleotide"
  modified_base 22..22: /mod_base="OTHER" /note="2'-OMe-nucleotide"
  modified_base 23..23: /mod_base="OTHER" /note="Cyclohexane-morpholino-thymidine analog 4"
  modified_base 24..24: /mod_base="OTHER" /note="Cyclohexane-morpholino-thymidine analog 4"
tttagacaauucaucauuugautt

SEQ ID NO: 911 - DNA, 22 bp, Artificial Sequence
  Description of Artificial Sequence: Synthetic oligonucleotide
  Description of Combined DNA/RNA Molecule: Synthetic oligonucleotide
  N-term hydroxyl group
  C-term hydroxyl group
  modified_base 1..1: /mod_base="OTHER" /note="GalNAc-morpholino-thymidine analog 7"
  modified_base 2..2: /mod_base="OTHER" /note="GalNAc-morpholino-thymidine analog 7"
  modified_base 3..3: /mod_base="OTHER" /note="GalNAc-morpholino-thymidine analog 7"
  modified_base 4..4: /mod_base="OTHER" /note="2'-OMe-nucleotide"
  modified_base 5..5: /mod_base="OTHER" /note="2'-OMe-nucleotide"
  modified_base 6..6: /mod_base="OTHER" /note="2'-OMe-nucleotide"
  modified_base 7..7: /mod_base="OTHER" /note="2'-OMe-nucleotide"
  modified_base 8..8: /mod_base="OTHER" /note="2'-fluoro-nucleotide"
  modified_base 9..9: /mod_base="OTHER" /note="2'-OMe-nucleotide"
  modified_base 10..10: /mod_base="OTHER" /note="2'-fluoro-nucleotide"
  modified_base 11..11: /mod_base="OTHER" /note="2'-fluoro-nucleotide"
  modified_base 12..12: /mod_base="OTHER" /note="2'-fluoro-nucleotide"
  modified_base 13..13: /mod_base="OTHER" /note="2'-OMe-nucleotide"
  modified_base 14..14: /mod_base="OTHER" /note="2'-OMe-nucleotide"
  modified_base 15..15: /mod_base="OTHER" /note="2'-OMe-nucleotide"
  modified_base 16..16: /mod_base="OTHER" /note="2'-OMe-nucleotide"
  modified_base 17..17: /mod_base="OTHER" /note="2'-OMe-nucleotide"
  modified_base 18..18: /mod_base="OTHER" /note="2'-OMe-nucleotide"
  modified_base 19..19: /mod_base="OTHER" /note="2'-OMe-nucleotide"
  modified_base 20..20: /mod_base="OTHER" /note="2'-OMe-nucleotide"
  misc_feature 20..21: /note="phosphorothioate bond"
  modified_base 21..21: /mod_base="OTHER" /note="2'-OMe-nucleotide"
  misc_feature 21..22: /note="phosphorothioate bond"
  modified_base 22..22: /mod_base="OTHER" /note="2'-OMe-nucleotide"
tttguauuaaauccuuaagaga

SEQ ID NO: 912 - DNA, 22 bp, Artificial Sequence
  Description of Artificial Sequence: Synthetic oligonucleotide
  Description of Combined DNA/RNA Molecule: Synthetic oligonucleotide
  N-term hydroxyl group
  C-term hydroxyl group
  modified_base 1..1: /mod_base="OTHER" /note="GalNAc-morpholino-thymidine analog 7"
  modified_base 2..2: /mod_base="OTHER" /note="GalNAc-morpholino-thymidine analog 7"
  modified_base 3..3: /mod_base="OTHER" /note="GalNAc-morpholino-thymidine analog 7"
  modified_base 4..4: /mod_base="OTHER" /note="2'-OMe-nucleotide"
  modified_base 5..5: /mod_base="OTHER" /note="2'-OMe-nucleotide"
  modified_base 6..6: /mod_base="OTHER" /note="2'-OMe-nucleotide"
  modified_base 7..7: /mod_base="OTHER" /note="2'-OMe-nucleotide"
  modified_base 8..8: /mod_base="OTHER" /note="2'-fluoro-nucleotide"
  modified_base 9..9: /mod_base="OTHER" /note="2'-OMe-nucleotide"
  modified_base 10..10: /mod_base="OTHER" /note="2'-fluoro-nucleotide"
  modified_base 11..11: /mod_base="OTHER" /note="2'-fluoro-nucleotide"
  modified_base 12..12: /mod_base="OTHER" /note="2'-fluoro-nucleotide"
  modified_base 13..13: /mod_base="OTHER" /note="2'-OMe-nucleotide"
  modified_base 14..14: /mod_base="OTHER" /note="2'-OMe-nucleotide"
  modified_base 15..15: /mod_base="OTHER" /note="2'-OMe-nucleotide"
  modified_base 16..16: /mod_base="OTHER" /note="2'-OMe-nucleotide"
  modified_base 17..17: /mod_base="OTHER" /note="2'-OMe-nucleotide"
  modified_base 18..18: /mod_base="OTHER" /note="2'-OMe-nucleotide"
  modified_base 19..19: /mod_base="OTHER" /note="2'-OMe-nucleotide"
  modified_base 20..20: /mod_base="OTHER" /note="2'-OMe-nucleotide"
  misc_feature 20..21: /note="phosphorothioate bond"
  modified_base 21..21: /mod_base="OTHER" /note="2'-OMe-nucleotide"
  misc_feature 21..22: /note="phosphorothioate bond"
  modified_base 22..22: /mod_base="OTHER" /note="2'-OMe-nucleotide"
tttguauuaaauccuuaagaga

SEQ ID NO: 913 - DNA, 22 bp, Artificial Sequence
  Description of Artificial Sequence: Synthetic oligonucleotide
  Description of Combined DNA/RNA Molecule: Synthetic oligonucleotide
  N-term hydroxyl group
  C-term hydroxyl group
  modified_base 1..1: /mod_base="OTHER" /note="GalNAc-morpholino-thymidine analog 7"
  modified_base 2..2: /mod_base="OTHER" /note="GalNAc-morpholino-thymidine analog 7"
  modified_base 3..3: /mod_base="OTHER" /note="GalNAc-morpholino-thymidine analog 7"
  modified_base 4..4: /mod_base="OTHER" /note="2'-OMe-nucleotide"
  modified_base 5..5: /mod_base="OTHER" /note="2'-OMe-nucleotide"
  modified_base 6..6: /mod_base="OTHER" /note="2'-OMe-nucleotide"
  modified_base 7..7: /mod_base="OTHER" /note="2'-OMe-nucleotide"
  modified_base 8..8: /mod_base="OTHER" /note="2'-fluoro-nucleotide"
  modified_base 9..9: /mod_base="OTHER" /note="2'-OMe-nucleotide"
  modified_base 10..10: /mod_base="OTHER" /note="2'-fluoro-nucleotide"
  modified_base 11..11: /mod_base="OTHER" /note="2'-fluoro-nucleotide"
  modified_base 12..12: /mod_base="OTHER" /note="2'-fluoro-nucleotide"
  modified_base 13..13: /mod_base="OTHER" /note="2'-OMe-nucleotide"
  modified_base 14..14: /mod_base="OTHER" /note="2'-OMe-nucleotide"
  modified_base 15..15: /mod_base="OTHER" /note="2'-OMe-nucleotide"
  modified_base 16..16: /mod_base="OTHER" /note="2'-OMe-nucleotide"
  modified_base 17..17: /mod_base="OTHER" /note="2'-OMe-nucleotide"
  modified_base 18..18: /mod_base="OTHER" /note="2'-OMe-nucleotide"
  modified_base 19..19: /mod_base="OTHER" /note="2'-OMe-nucleotide"
  modified_base 20..20: /mod_base="OTHER" /note="2'-OMe-nucleotide"
  misc_feature 20..21: /note="phosphorothioate bond"
  modified_base 21..21: /mod_base="OTHER" /note="2'-OMe-nucleotide"
  misc_feature 21..22: /note="phosphorothioate bond"
  modified_base 22..22: /mod_base="OTHER" /note="2'-OMe-nucleotide"
tttguauuaaauccuuaagaga

SEQ ID NO: 914 - DNA, 22 bp, Artificial Sequence
  Description of Artificial Sequence: Synthetic oligonucleotide
  Description of Combined DNA/RNA Molecule: Synthetic oligonucleotide
  N-term hydroxyl group
  C-term hydroxyl group
  modified_base 1..1: /mod_base="OTHER" /note="GalNAc-morpholino-thymidine analog 7"
  modified_base 2..2: /mod_base="OTHER" /note="GalNAc-morpholino-thymidine analog 7"
  modified_base 3..3: /mod_base="OTHER" /note="GalNAc-morpholino-thymidine analog 7"
  modified_base 4..4: /mod_base="OTHER" /note="2'-OMe-nucleotide"
  modified_base 5..5: /mod_base="OTHER" /note="2'-OMe-nucleotide"
  modified_base 6..6: /mod_base="OTHER" /note="2'-OMe-nucleotide"
  modified_base 7..7: /mod_base="OTHER" /note="2'-OMe-nucleotide"
  modified_base 8..8: /mod_base="OTHER" /note="2'-fluoro-nucleotide"
  modified_base 9..9: /mod_base="OTHER" /note="2'-OMe-nucleotide"
  modified_base 10..10: /mod_base="OTHER" /note="2'-fluoro-nucleotide"
  modified_base 11..11: /mod_base="OTHER" /note="2'-fluoro-nucleotide"
  modified_base 12..12: /mod_base="OTHER" /note="2'-fluoro-nucleotide"
  modified_base 13..13: /mod_base="OTHER" /note="2'-OMe-nucleotide"
  modified_base 14..14: /mod_base="OTHER" /note="2'-OMe-nucleotide"
  modified_base 15..15: /mod_base="OTHER" /note="2'-OMe-nucleotide"
  modified_base 16..16: /mod_base="OTHER" /note="2'-OMe-nucleotide"
  modified_base 17..17: /mod_base="OTHER" /note="2'-OMe-nucleotide"
  modified_base 18..18: /mod_base="OTHER" /note="2'-OMe-nucleotide"
  modified_base 19..19: /mod_base="OTHER" /note="2'-OMe-nucleotide"
  modified_base 20..20: /mod_base="OTHER" /note="2'-OMe-nucleotide"
  misc_feature 20..21: /note="phosphorothioate bond"
  modified_base 21..21: /mod_base="OTHER" /note="2'-OMe-nucleotide"
  misc_feature 21..22: /note="phosphorothioate bond"
  modified_base 22..22: /mod_base="OTHER" /note="2'-OMe-nucleotide"
tttguauuaaauccuuaagaga

SEQ ID NO: 915 - DNA, 22 bp, Artificial Sequence
  Description of Artificial Sequence: Synthetic oligonucleotide
  Description of Combined DNA/RNA Molecule: Synthetic oligonucleotide
  N-term hydroxyl group
  C-term hydroxyl group
  modified_base 1..1: /mod_base="OTHER" /note="GalNAc-morpholino-thymidine analog 7"
  modified_base 2..2: /mod_base="OTHER" /note="GalNAc-morpholino-thymidine analog 7"
  modified_base 3..3: /mod_base="OTHER" /note="GalNAc-morpholino-thymidine analog 7"
  modified_base 4..4: /mod_base="OTHER" /note="Locked nucleic acid (LNA) nucleotide"
  modified_base 5..5: /mod_base="OTHER" /note="Locked nucleic acid (LNA) nucleotide"
  modified_base 6..6: /mod_base="OTHER" /note="2'-OMe-nucleotide"
  modified_base 7..7: /mod_base="OTHER" /note="2'-OMe-nucleotide"
  modified_base 8..8: /mod_base="OTHER" /note="2'-fluoro-nucleotide"
  modified_base 9..9: /mod_base="OTHER" /note="2'-OMe-nucleotide"
  modified_base 10..10: /mod_base="OTHER" /note="2'-fluoro-nucleotide"
  modified_base 11..11: /mod_base="OTHER" /note="2'-fluoro-nucleotide"
  modified_base 12..12: /mod_base="OTHER" /note="2'-fluoro-nucleotide"
  modified_base 13..13: /mod_base="OTHER" /note="2'-OMe-nucleotide"
  modified_base 14..14: /mod_base="OTHER" /note="2'-OMe-nucleotide"
  modified_base 15..15: /mod_base="OTHER" /note="2'-OMe-nucleotide"
  modified_base 16..16: /mod_base="OTHER" /note="2'-OMe-nucleotide"
  modified_base 17..17: /mod_base="OTHER" /note="2'-OMe-nucleotide"
  modified_base 18..18: /mod_base="OTHER" /note="2'-OMe-nucleotide"
  modified_base 19..19: /mod_base="OTHER" /note="2'-OMe-nucleotide"
  modified_base 20..20: /mod_base="OTHER" /note="2'-OMe-nucleotide"
  misc_feature 20..21: /note="phosphorothioate bond"
  modified_base 21..21: /mod_base="OTHER" /note="2'-OMe-nucleotide"
  misc_feature 21..22: /note="phosphorothioate bond"
  modified_base 22..22: /mod_base="OTHER" /note="2'-OMe-nucleotide"
tttguauuaaauccuuaagaga

SEQ ID NO: 916 - DNA, 22 bp, Artificial Sequence
  Description of Artificial Sequence: Synthetic oligonucleotide
  Description of Combined DNA/RNA Molecule: Synthetic oligonucleotide
  N-term hydroxyl group
  C-term hydroxyl group
  modified_base 1..1: /mod_base="OTHER" /note="GalNAc-morpholino-thymidine analog 7"
  modified_base 2..2: /mod_base="OTHER" /note="GalNAc-morpholino-thymidine analog 7"
  modified_base 3..3: /mod_base="OTHER" /note="GalNAc-morpholino-thymidine analog 7"
  modified_base 4..4: /mod_base="OTHER" /note="Locked nucleic acid (LNA) nucleotide"
  modified_base 5..5: /mod_base="OTHER" /note="Locked nucleic acid (LNA) nucleotide"
  modified_base 6..6: /mod_base="OTHER" /note="2'-OMe-nucleotide"
  modified_base 7..7: /mod_base="OTHER" /note="2'-OMe-nucleotide"
  modified_base 8..8: /mod_base="OTHER" /note="2'-fluoro-nucleotide"
  modified_base 9..9: /mod_base="OTHER" /note="2'-OMe-nucleotide"
  modified_base 10..10: /mod_base="OTHER" /note="2'-fluoro-nucleotide"
  modified_base 11..11: /mod_base="OTHER" /note="2'-fluoro-nucleotide"
  modified_base 12..12: /mod_base="OTHER" /note="2'-fluoro-nucleotide"
  modified_base 13..13: /mod_base="OTHER" /note="2'-OMe-nucleotide"
  modified_base 14..14: /mod_base="OTHER" /note="2'-OMe-nucleotide"
  modified_base 15..15: /mod_base="OTHER" /note="2'-OMe-nucleotide"
  modified_base 16..16: /mod_base="OTHER" /note="2'-OMe-nucleotide"
  modified_base 17..17: /mod_base="OTHER" /note="2'-OMe-nucleotide"
  modified_base 18..18: /mod_base="OTHER" /note="2'-OMe-nucleotide"
  modified_base 19..19: /mod_base="OTHER" /note="2'-OMe-nucleotide"
  modified_base 20..20: /mod_base="OTHER" /note="2'-OMe-nucleotide"
  misc_feature 20..21: /note="phosphorothioate bond"
  modified_base 21..21: /mod_base="OTHER" /note="2'-OMe-nucleotide"
  misc_feature 21..22: /note="phosphorothioate bond"
  modified_base 22..22: /mod_base="OTHER" /note="2'-OMe-nucleotide"
tttguauuaaauccuuaagaga

SEQ ID NO: 917 - DNA, 22 bp, Artificial Sequence
  Description of Artificial Sequence: Synthetic oligonucleotide
  Description of Combined DNA/RNA Molecule: Synthetic oligonucleotide
  N-term hydroxyl group
  C-term hydroxyl group
  modified_base 1..1: /mod_base="OTHER" /note="GalNAc-morpholino-thymidine analog 7"
  modified_base 2..2: /mod_base="OTHER" /note="GalNAc-morpholino-thymidine analog 7"
  modified_base 3..3: /mod_base="OTHER" /note="GalNAc-morpholino-thymidine analog 7"
  modified_base 4..4: /mod_base="OTHER" /note="Locked nucleic acid (LNA) nucleotide"
  modified_base 5..5: /mod_base="OTHER" /note="Locked nucleic acid (LNA) nucleotide"
  modified_base 6..6: /mod_base="OTHER" /note="2'-OMe-nucleotide"
  modified_base 7..7: /mod_base="OTHER" /note="2'-OMe-nucleotide"
  modified_base 8..8: /mod_base="OTHER" /note="2'-fluoro-nucleotide"
  modified_base 9..9: /mod_base="OTHER" /note="2'-OMe-nucleotide"
  modified_base 10..10: /mod_base="OTHER" /note="2'-fluoro-nucleotide"
  modified_base 11..11: /mod_base="OTHER" /note="2'-fluoro-nucleotide"
  modified_base 12..12: /mod_base="OTHER" /note="2'-fluoro-nucleotide"
  modified_base 13..13: /mod_base="OTHER" /note="2'-OMe-nucleotide"
  modified_base 14..14: /mod_base="OTHER" /note="2'-OMe-nucleotide"
  modified_base 15..15: /mod_base="OTHER" /note="2'-OMe-nucleotide"
  modified_base 16..16: /mod_base="OTHER" /note="2'-OMe-nucleotide"
  modified_base 17..17: /mod_base="OTHER" /note="2'-OMe-nucleotide"
  modified_base 18..18: /mod_base="OTHER" /note="2'-OMe-nucleotide"
  modified_base 19..19: /mod_base="OTHER" /note="2'-OMe-nucleotide"
  modified_base 20..20: /mod_base="OTHER" /note="2'-OMe-nucleotide"
  misc_feature 20..21: /note="phosphorothioate bond"
  modified_base 21..21: /mod_base="OTHER" /note="2'-OMe-nucleotide"
  misc_feature 21..22: /note="phosphorothioate bond"
  modified_base 22..22: /mod_base="OTHER" /note="2'-OMe-nucleotide"
tttguauuaaauccuuaagaga

SEQ ID NO: 918 - DNA, 22 bp, Artificial Sequence
  Description of Artificial Sequence: Synthetic oligonucleotide
  Description of Combined DNA/RNA Molecule: Synthetic oligonucleotide
  N-term hydroxyl group
  C-term hydroxyl group
  modified_base 1..1: /mod_base="OTHER" /note="GalNAc-morpholino-thymidine analog 7"
  modified_base 2..2: /mod_base="OTHER" /note="GalNAc-morpholino-thymidine analog 7"
  modified_base 3..3: /mod_base="OTHER" /note="GalNAc-morpholino-thymidine analog 7"
  modified_base 4..4: /mod_base="OTHER" /note="Locked nucleic acid (LNA) nucleotide"
  modified_base 5..5: /mod_base="OTHER" /note="Locked nucleic acid (LNA) nucleotide"
  modified_base 6..6: /mod_base="OTHER" /note="2'-OMe-nucleotide"
  modified_base 7..7: /mod_base="OTHER" /note="2'-OMe-nucleotide"
  modified_base 8..8: /mod_base="OTHER" /note="2'-fluoro-nucleotide"
  modified_base 9..9: /mod_base="OTHER" /note="2'-OMe-nucleotide"
  modified_base 10..10: /mod_base="OTHER" /note="2'-fluoro-nucleotide"
  modified_base 11..11: /mod_base="OTHER" /note="2'-fluoro-nucleotide"
  modified_base 12..12: /mod_base="OTHER" /note="2'-fluoro-nucleotide"
  modified_base 13..13: /mod_base="OTHER" /note="2'-OMe-nucleotide"
  modified_base 14..14: /mod_base="OTHER" /note="2'-OMe-nucleotide"
  modified_base 15..15: /mod_base="OTHER" /note="2'-OMe-nucleotide"
  modified_base 16..16: /mod_base="OTHER" /note="2'-OMe-nucleotide"
  modified_base 17..17: /mod_base="OTHER" /note="2'-OMe-nucleotide"
  modified_base 18..18: /mod_base="OTHER" /note="2'-OMe-nucleotide"
  modified_base 19..19: /mod_base="OTHER" /note="2'-OMe-nucleotide"
  modified_base 20..20: /mod_base="OTHER" /note="2'-OMe-nucleotide"
  misc_feature 20..21: /note="phosphorothioate bond"
  modified_base 21..21: /mod_base="OTHER" /note="2'-OMe-nucleotide"
  misc_feature 21..22: /note="phosphorothioate bond"
  modified_base 22..22: /mod_base="OTHER" /note="2'-OMe-nucleotide"
tttguauuaaauccuuaagaga

SEQ ID NO: 919 - DNA, 22 bp, Artificial Sequence
  Description of Artificial Sequence: Synthetic oligonucleotide
  Description of Combined DNA/RNA Molecule: Synthetic oligonucleotide
  N-term hydroxyl group
  C-term hydroxyl group
  modified_base 1..1: /mod_base="OTHER" /note="GalNAc-morpholino-thymidine analog 7"
  modified_base 2..2: /mod_base="OTHER" /note="GalNAc-morpholino-thymidine analog 7"
  modified_base 3..3: /mod_base="OTHER" /note="GalNAc-morpholino-thymidine analog 7"
  modified_base 4..4: /mod_base="OTHER" /note="2'-OMe-nucleotide"
  modified_base 5..5: /mod_base="OTHER" /note="2'-OMe-nucleotide"
  modified_base 6..6: /mod_base="OTHER" /note="2'-OMe-nucleotide"
  modified_base 7..7: /mod_base="OTHER" /note="2'-OMe-nucleotide"
  modified_base 8..8: /mod_base="OTHER" /note="2'-fluoro-nucleotide"
  modified_base 9..9: /mod_base="OTHER" /note="2'-OMe-nucleotide"
  modified_base 10..10: /mod_base="OTHER" /note="2'-fluoro-nucleotide"
  modified_base 11..11: /mod_base="OTHER" /note="2'-OMe-nucleotide"
  modified_base 12..12: /mod_base="OTHER" /note="2'-fluoro-nucleotide"
  modified_base 13..13: /mod_base="OTHER" /note="2'-fluoro-nucleotide"
  modified_base 14..14: /mod_base="OTHER" /note="2'-fluoro-nucleotide"
  modified_base 15..15: /mod_base="OTHER" /note="2'-OMe-nucleotide"
  modified_base 16..16: /mod_base="OTHER" /note="2'-OMe-nucleotide"
  modified_base 17..17: /mod_base="OTHER" /note="2'-OMe-nucleotide"
  modified_base 18..18: /mod_base="OTHER" /note="2'-OMe-nucleotide"
  modified_base 19..19: /mod_base="OTHER" /note="2'-OMe-nucleotide"
  modified_base 20..20: /mod_base="OTHER" /note="2'-OMe-nucleotide"
  misc_feature 20..21: /note="phosphorothioate bond"
  modified_base 21..21: /mod_base="OTHER" /note="2'-OMe-nucleotide"
  misc_feature 21..22: /note="phosphorothioate bond"
  modified_base 22..22: /mod_base="OTHER" /note="2'-OMe-nucleotide"
tttguauuaaauccuuaagaga

SEQ ID NO: 920 - DNA, 22 bp, Artificial Sequence
  Description of Artificial Sequence: Synthetic oligonucleotide
  Description of Combined DNA/RNA Molecule: Synthetic oligonucleotide
  N-term hydroxyl group
  C-term hydroxyl group
  modified_base 1..1: /mod_base="OTHER" /note="GalNAc-morpholino-thymidine analog 7"
  modified_base 2..2: /mod_base="OTHER" /note="GalNAc-morpholino-thymidine analog 7"
  modified_base 3..3: /mod_base="OTHER" /note="GalNAc-morpholino-thymidine analog 7"
  modified_base 4..4: /mod_base="OTHER" /note="2'-OMe-nucleotide"
  modified_base 5..5: /mod_base="OTHER" /note="2'-OMe-nucleotide"
  modified_base 6..6: /mod_base="OTHER" /note="2'-OMe-nucleotide"
  modified_base 7..7: /mod_base="OTHER" /note="2'-OMe-nucleotide"
  modified_base 8..8: /mod_base="OTHER" /note="2'-fluoro-nucleotide"
  modified_base 9..9: /mod_base="OTHER" /note="2'-OMe-nucleotide"
  modified_base 10..10: /mod_base="OTHER" /note="2'-fluoro-nucleotide"
  modified_base 11..11: /mod_base="OTHER" /note="2'-OMe-nucleotide"
  modified_base 12..12: /mod_base="OTHER" /note="2'-fluoro-nucleotide"
  modified_base 13..13: /mod_base="OTHER" /note="2'-fluoro-nucleotide"
  modified_base 14..14: /mod_base="OTHER" /note="2'-fluoro-nucleotide"
  modified_base 15..15: /mod_base="OTHER" /note="2'-OMe-nucleotide"
  modified_base 16..16: /mod_base="OTHER" /note="2'-OMe-nucleotide"
  modified_base 17..17: /mod_base="OTHER" /note="2'-OMe-nucleotide"
  modified_base 18..18: /mod_base="OTHER" /note="2'-OMe-nucleotide"
  modified_base 19..19: /mod_base="OTHER" /note="2'-OMe-nucleotide"
  modified_base 20..20: /mod_base="OTHER" /note="2'-OMe-nucleotide"
  misc_feature 20..21: /note="phosphorothioate bond"
  modified_base 21..21: /mod_base="OTHER" /note="2'-OMe-nucleotide"
  misc_feature 21..22: /note="phosphorothioate bond"
  modified_base 22..22: /mod_base="OTHER" /note="2'-OMe-nucleotide"
tttguauuaaauccuuaagaga

SEQ ID NO: 921 - DNA, 22 bp, Artificial Sequence
  Description of Artificial Sequence: Synthetic oligonucleotide
  Description of Combined DNA/RNA Molecule: Synthetic oligonucleotide
  N-term hydroxyl group
  C-term hydroxyl group
  modified_base 1..1: /mod_base="OTHER" /note="GalNAc-morpholino-thymidine analog 7"
  modified_base 2..2: /mod_base="OTHER" /note="GalNAc-morpholino-thymidine analog 7"
  modified_base 3..3: /mod_base="OTHER" /note="GalNAc-morpholino-thymidine analog 7"
  modified_base 4..4: /mod_base="OTHER" /note="2'-OMe-nucleotide"
  modified_base 5..5: /mod_base="OTHER" /note="2'-OMe-nucleotide"
  modified_base 6..6: /mod_base="OTHER" /note="2'-OMe-nucleotide"
  modified_base 7..7: /mod_base="OTHER" /note="2'-OMe-nucleotide"
  modified_base 8..8: /mod_base="OTHER" /note="2'-fluoro-nucleotide"
  modified_base 9..9: /mod_base="OTHER" /note="2'-OMe-nucleotide"
  modified_base 10..10: /mod_base="OTHER" /note="2'-fluoro-nucleotide"
  modified_base 11..11: /mod_base="OTHER" /note="2'-OMe-nucleotide"
  modified_base 12..12: /mod_base="OTHER" /note="2'-fluoro-nucleotide"
  modified_base 13..13: /mod_base="OTHER" /note="2'-fluoro-nucleotide"
  modified_base 14..14: /mod_base="OTHER" /note="2'-fluoro-nucleotide"
  modified_base 15..15: /mod_base="OTHER" /note="2'-OMe-nucleotide"
  modified_base 16..16: /mod_base="OTHER" /note="2'-OMe-nucleotide"
  modified_base 17..17: /mod_base="OTHER" /note="2'-OMe-nucleotide"
  modified_base 18..18: /mod_base="OTHER" /note="2'-OMe-nucleotide"
  modified_base 19..19: /mod_base="OTHER" /note="2'-OMe-nucleotide"
  modified_base 20..20: /mod_base="OTHER" /note="2'-OMe-nucleotide"
  misc_feature 20..21: /note="phosphorothioate bond"
  modified_base 21..21: /mod_base="OTHER" /note="2'-OMe-nucleotide"
  misc_feature 21..22: /note="phosphorothioate bond"
  modified_base 22..22: /mod_base="OTHER" /note="2'-OMe-nucleotide"
tttguauuaaauccuuaagaga

SEQ ID NO: 922 - DNA, 22 bp, Artificial Sequence
  Description of Artificial Sequence: Synthetic oligonucleotide
  Description of Combined DNA/RNA Molecule: Synthetic oligonucleotide
  N-term hydroxyl group
  C-term hydroxyl group
  modified_base 1..1: /mod_base="OTHER" /note="GalNAc-morpholino-thymidine analog 7"
  modified_base 2..2: /mod_base="OTHER" /note="GalNAc-morpholino-thymidine analog 7"
  modified_base 3..3: /mod_base="OTHER" /note="GalNAc-morpholino-thymidine analog 7"
  modified_base 4..4: /mod_base="OTHER" /note="2'-OMe-nucleotide"
  modified_base 5..5: /mod_base="OTHER" /note="2'-OMe-nucleotide"
  modified_base 6..6: /mod_base="OTHER" /note="2'-OMe-nucleotide"
  modified_base 7..7: /mod_base="OTHER" /note="2'-OMe-nucleotide"
  modified_base 8..8: /mod_base="OTHER" /note="2'-fluoro-nucleotide"
  modified_base 9..9: /mod_base="OTHER" /note="2'-OMe-nucleotide"
  modified_base 10..10: /mod_base="OTHER" /note="2'-fluoro-nucleotide"
  modified_base 11..11: /mod_base="OTHER" /note="2'-OMe-nucleotide"
  modified_base 12..12: /mod_base="OTHER" /note="2'-fluoro-nucleotide"
  modified_base 13..13: /mod_base="OTHER" /note="2'-fluoro-nucleotide"
  modified_base 14..14: /mod_base="OTHER" /note="2'-fluoro-nucleotide"
  modified_base 15..15: /mod_base="OTHER" /note="2'-OMe-nucleotide"
  modified_base 16..16: /mod_base="OTHER" /note="2'-OMe-nucleotide"
  modified_base 17..17: /mod_base="OTHER" /note="2'-OMe-nucleotide"
  modified_base 18..18: /mod_base="OTHER" /note="2'-OMe-nucleotide"
  modified_base 19..19: /mod_base="OTHER" /note="2'-OMe-nucleotide"
  modified_base 20..20: /mod_base="OTHER" /note="2'-OMe-nucleotide"
  misc_feature 20..21: /note="phosphorothioate bond"
  modified_base 21..21: /mod_base="OTHER" /note="2'-OMe-nucleotide"
  misc_feature 21..22: /note="phosphorothioate bond"
  modified_base 22..22: /mod_base="OTHER" /note="2'-OMe-nucleotide"
tttguauuaaauccuuaagaga

SEQ ID NO: 923 - DNA, 22 bp, Artificial Sequence
  Description of Artificial Sequence: Synthetic oligonucleotide
  Description of Combined DNA/RNA Molecule: Synthetic oligonucleotide
  N-term hydroxyl group
  C-term hydroxyl group
  modified_base 1..1: /mod_base="OTHER" /note="GalNAc-morpholino-thymidine analog 7"
  modified_base 2..2: /mod_base="OTHER" /note="GalNAc-morpholino-thymidine analog 7"
  modified_base 3..3: /mod_base="OTHER" /note="GalNAc-morpholino-thymidine analog 7"
  modified_base 4..4: /mod_base="OTHER" /note="2'-OMe-nucleotide"
  modified_base 5..5: /mod_base="OTHER" /note="2'-OMe-nucleotide"
  modified_base 6..6: /mod_base="OTHER" /note="2'-OMe-nucleotide"
  modified_base 7..7: /mod_base="OTHER" /note="2'-OMe-nucleotide"
  modified_base 8..8: /mod_base="OTHER" /note="2'-fluoro-nucleotide"
  modified_base 9..9: /mod_base="OTHER" /note="2'-OMe-nucleotide"
  modified_base 10..10: /mod_base="OTHER" /note="2'-fluoro-nucleotide"
  modified_base 11..11: /mod_base="OTHER" /note="2'-OMe-nucleotide"
  modified_base 12..12: /mod_base="OTHER" /note="2'-fluoro-nucleotide"
  modified_base 13..13: /mod_base="OTHER" /note="2'-fluoro-nucleotide"
  modified_base 14..14: /mod_base="OTHER" /note="2'-fluoro-nucleotide"
  modified_base 15..15: /mod_base="OTHER" /note="2'-OMe-nucleotide"
  modified_base 16..16: /mod_base="OTHER" /note="2'-OMe-nucleotide"
  modified_base 17..17: /mod_base="OTHER" /note="2'-OMe-nucleotide"
  modified_base 18..18: /mod_base="OTHER" /note="2'-OMe-nucleotide"
  modified_base 19..19: /mod_base="OTHER" /note="2'-OMe-nucleotide"
  modified_base 20..20: /mod_base="OTHER" /note="2'-OMe-nucleotide"
  misc_feature 20..21: /note="phosphorothioate bond"
  modified_base 21..21: /mod_base="OTHER" /note="2'-OMe-nucleotide"
  misc_feature 21..22: /note="phosphorothioate bond"
  modified_base 22..22: /mod_base="OTHER" /note="2'-OMe-nucleotide"
tttguauuaaauccuuaagaga

SEQ ID NO: 924 - DNA, 22 bp, Artificial Sequence
  Description of Artificial Sequence: Synthetic oligonucleotide
  Description of Combined DNA/RNA Molecule: Synthetic oligonucleotide
  N-term hydroxyl group
  C-term hydroxyl group
  modified_base 1..1: /mod_base="OTHER" /note="GalNAc-morpholino-thymidine analog 7"
  modified_base 2..2: /mod_base="OTHER" /note="GalNAc-morpholino-thymidine analog 7"
  modified_base 3..3: /mod_base="OTHER" /note="GalNAc-morpholino-thymidine analog 7"
  modified_base 4..4: /mod_base="OTHER" /note="Locked nucleic acid (LNA) nucleotide"
  modified_base 5..5: /mod_base="OTHER" /note="Locked nucleic acid (LNA) nucleotide"
  modified_base 6..6: /mod_base="OTHER" /note="2'-OMe-nucleotide"
  modified_base 7..7: /mod_base="OTHER" /note="2'-OMe-nucleotide"
  modified_base 8..8: /mod_base="OTHER" /note="2'-fluoro-nucleotide"
  modified_base 9..9: /mod_base="OTHER" /note="2'-OMe-nucleotide"
  modified_base 10..10: /mod_base="OTHER" /note="2'-fluoro-nucleotide"
  modified_base 11..11: /mod_base="OTHER" /note="2'-OMe-nucleotide"
  modified_base 12..12: /mod_base="OTHER" /note="2'-fluoro-nucleotide"
  modified_base 13..13: /mod_base="OTHER" /note="2'-fluoro-nucleotide"
  modified_base 14..14: /mod_base="OTHER" /note="2'-fluoro-nucleotide"
  modified_base 15..15: /mod_base="OTHER" /note="2'-OMe-nucleotide"
  modified_base 16..16: /mod_base="OTHER" /note="2'-OMe-nucleotide"
  modified_base 17..17: /mod_base="OTHER" /note="2'-OMe-nucleotide"
  modified_base 18..18: /mod_base="OTHER" /note="2'-OMe-nucleotide"
  modified_base 19..19: /mod_base="OTHER" /note="2'-OMe-nucleotide"
  modified_base 20..20: /mod_base="OTHER" /note="2'-OMe-nucleotide"
  misc_feature 20..21: /note="phosphorothioate bond"
  modified_base 21..21: /mod_base="OTHER" /note="2'-OMe-nucleotide"
  misc_feature 21..22: /note="phosphorothioate bond"
  modified_base 22..22: /mod_base="OTHER" /note="2'-OMe-nucleotide"
tttguauuaaauccuuaagaga

SEQ ID NO: 925 - DNA, 22 bp, Artificial Sequence
  Description of Artificial Sequence: Synthetic oligonucleotide
  Description of Combined DNA/RNA Molecule: Synthetic oligonucleotide
  N-term hydroxyl group
  C-term hydroxyl group
  modified_base 1..1: /mod_base="OTHER" /note="GalNAc-morpholino-thymidine analog 7"
  modified_base 2..2: /mod_base="OTHER" /note="GalNAc-morpholino-thymidine analog 7"
  modified_base 3..3: /mod_base="OTHER" /note="GalNAc-morpholino-thymidine analog 7"
  modified_base 4..4: /mod_base="OTHER" /note="Locked nucleic acid (LNA) nucleotide"
  modified_base 5..5: /mod_base="OTHER" /note="Locked nucleic acid (LNA) nucleotide"
  modified_base 6..6: /mod_base="OTHER" /note="2'-OMe-nucleotide"
  modified_base 7..7: /mod_base="OTHER" /note="2'-OMe-nucleotide"
  modified_base 8..8: /mod_base="OTHER" /note="2'-fluoro-nucleotide"
  modified_base 9..9: /mod_base="OTHER" /note="2'-OMe-nucleotide"
  modified_base 10..10: /mod_base="OTHER" /note="2'-fluoro-nucleotide"
  modified_base 11..11: /mod_base="OTHER" /note="2'-OMe-nucleotide"
  modified_base 12..12: /mod_base="OTHER" /note="2'-fluoro-nucleotide"
  modified_base 13..13: /mod_base="OTHER" /note="2'-fluoro-nucleotide"
  modified_base 14..14: /mod_base="OTHER" /note="2'-fluoro-nucleotide"
  modified_base 15..15: /mod_base="OTHER" /note="2'-OMe-nucleotide"
  modified_base 16..16: /mod_base="OTHER" /note="2'-OMe-nucleotide"
  modified_base 17..17: /mod_base="OTHER" /note="2'-OMe-nucleotide"
  modified_base 18..18: /mod_base="OTHER" /note="2'-OMe-nucleotide"
  modified_base 19..19: /mod_base="OTHER" /note="2'-OMe-nucleotide"
  modified_base 20..20: /mod_base="OTHER" /note="2'-OMe-nucleotide"
  misc_feature 20..21: /note="phosphorothioate bond"
  modified_base 21..21: /mod_base="OTHER" /note="2'-OMe-nucleotide"
  misc_feature 21..22: /note="phosphorothioate bond"
  modified_base 22..22: /mod_base="OTHER" /note="2'-OMe-nucleotide"
tttguauuaaauccuuaagaga

SEQ ID NO: 926 - DNA, 22 bp, Artificial Sequence
  Description of Artificial Sequence: Synthetic oligonucleotide
  Description of Combined DNA/RNA Molecule: Synthetic oligonucleotide
  N-term hydroxyl group
  C-term hydroxyl group
  modified_base 1..1: /mod_base="OTHER" /note="GalNAc-morpholino-thymidine analog 7"
  modified_base 2..2: /mod_base="OTHER" /note="GalNAc-morpholino-thymidine analog 7"
  modified_base 3..3: /mod_base="OTHER" /note="GalNAc-morpholino-thymidine analog 7"
  modified_base 4..4: /mod_base="OTHER" /note="Locked nucleic acid (LNA) nucleotide"
  modified_base 5..5: /mod_base="OTHER" /note="Locked nucleic acid (LNA) nucleotide"
  modified_base 6..6: /mod_base="OTHER" /note="2'-OMe-nucleotide"
  modified_base 7..7: /mod_base="OTHER" /note="2'-OMe-nucleotide"
  modified_base 8..8: /mod_base="OTHER" /note="2'-fluoro-nucleotide"
  modified_base 9..9: /mod_base="OTHER" /note="2'-OMe-nucleotide"
  modified_base 10..10: /mod_base="OTHER" /note="2'-fluoro-nucleotide"
  modified_base 11..11: /mod_base="OTHER" /note="2'-OMe-nucleotide"
  modified_base 12..12: /mod_base="OTHER" /note="2'-fluoro-nucleotide"
  modified_base 13..13: /mod_base="OTHER" /note="2'-fluoro-nucleotide"
  modified_base 14..14: /mod_base="OTHER" /note="2'-fluoro-nucleotide"
  modified_base 15..15: /mod_base="OTHER" /note="2'-OMe-nucleotide"
  modified_base 16..16: /mod_base="OTHER" /note="2'-OMe-nucleotide"
  modified_base 17..17: /mod_base="OTHER" /note="2'-OMe-nucleotide"
  modified_base 18..18: /mod_base="OTHER" /note="2'-OMe-nucleotide"
  modified_base 19..19: /mod_base="OTHER" /note="2'-OMe-nucleotide"
  modified_base 20..20: /mod_base="OTHER" /note="2'-OMe-nucleotide"
  misc_feature 20..21: /note="phosphorothioate bond"
  modified_base 21..21: /mod_base="OTHER" /note="2'-OMe-nucleotide"
  misc_feature 21..22: /note="phosphorothioate bond"
  modified_base 22..22: /mod_base="OTHER" /note="2'-OMe-nucleotide"
tttguauuaaauccuuaagaga

SEQ ID NO: 927 - DNA, 22 bp, Artificial Sequence
  Description of Artificial Sequence: Synthetic oligonucleotide
  Description of Combined DNA/RNA Molecule: Synthetic oligonucleotide
  N-term hydroxyl group
  C-term hydroxyl group
  modified_base 1..1: /mod_base="OTHER" /note="GalNAc-morpholino-thymidine analog 7"
  modified_base 2..2: /mod_base="OTHER" /note="GalNAc-morpholino-thymidine analog 7"
  modified_base 3..3: /mod_base="OTHER" /note="GalNAc-morpholino-thymidine analog 7"
  modified_base 4..4: /mod_base="OTHER" /note="Locked nucleic acid (LNA) nucleotide"
  modified_base 5..5: /mod_base="OTHER" /note="Locked nucleic acid (LNA) nucleotide"
  modified_base 6..6: /mod_base="OTHER" /note="2'-OMe-nucleotide"
  modified_base 7..7: /mod_base="OTHER" /note="2'-OMe-nucleotide"
  modified_base 8..8: /mod_base="OTHER" /note="2'-fluoro-nucleotide"
  modified_base 9..9: /mod_base="OTHER" /note="2'-OMe-nucleotide"
  modified_base 10..10: /mod_base="OTHER" /note="2'-fluoro-nucleotide"
  modified_base 11..11: /mod_base="OTHER" /note="2'-OMe-nucleotide"
  modified_base 12..12: /mod_base="OTHER" /note="2'-fluoro-nucleotide"
  modified_base 13..13: /mod_base="OTHER" /note="2'-fluoro-nucleotide"
  modified_base 14..14: /mod_base="OTHER" /note="2'-fluoro-nucleotide"
  modified_base 15..15: /mod_base="OTHER" /note="2'-OMe-nucleotide"
  modified_base 16..16: /mod_base="OTHER" /note="2'-OMe-nucleotide"
  modified_base 17..17: /mod_base="OTHER" /note="2'-OMe-nucleotide"
  modified_base 18..18: /mod_base="OTHER" /note="2'-OMe-nucleotide"
  modified_base 19..19: /mod_base="OTHER" /note="2'-OMe-nucleotide"
  modified_base 20..20: /mod_base="OTHER" /note="2'-OMe-nucleotide"
  misc_feature 20..21: /note="phosphorothioate bond"
  modified_base 21..21: /mod_base="OTHER" /note="2'-OMe-nucleotide"
  misc_feature 21..22: /note="phosphorothioate bond"
  modified_base 22..22: /mod_base="OTHER" /note="2'-OMe-nucleotide"
tttguauuaaauccuuaagaga

SEQ ID NO: 928 - DNA, 22 bp, Artificial Sequence
  Description of Artificial Sequence: Synthetic oligonucleotide
  Description of Combined DNA/RNA Molecule: Synthetic oligonucleotide
  N-term hydroxyl group
  C-term hydroxyl group
  modified_base 1..1: /mod_base="OTHER" /note="GalNAc-morpholino-thymidine analog 7"
  modified_base 2..2: /mod_base="OTHER" /note="GalNAc-morpholino-thymidine analog 7"
  modified_base 3..3: /mod_base="OTHER" /note="GalNAc-morpholino-thymidine analog 7"
  modified_base 4..4: /mod_base="OTHER" /note="Locked nucleic acid (LNA) nucleotide"
  modified_base 5..5: /mod_base="OTHER" /note="Locked nucleic acid (LNA) nucleotide"
  modified_base 6..6: /mod_base="OTHER" /note="2'-OMe-nucleotide"
  modified_base 7..7: /mod_base="OTHER" /note="2'-OMe-nucleotide"
  modified_base 8..8: /mod_base="OTHER" /note="2'-fluoro-nucleotide"
  modified_base 9..9: /mod_base="OTHER" /note="2'-OMe-nucleotide"
  modified_base 10..10: /mod_base="OTHER" /note="2'-fluoro-nucleotide"
  modified_base 11..11: /mod_base="OTHER" /note="2'-OMe-nucleotide"
  modified_base 12..12: /mod_base="OTHER" /note="2'-fluoro-nucleotide"
  modified_base 13..13: /mod_base="OTHER" /note="2'-fluoro-nucleotide"
  modified_base 14..14: /mod_base="OTHER" /note="2'-fluoro-nucleotide"
  modified_base 15..15: /mod_base="OTHER" /note="2'-OMe-nucleotide"
  modified_base 16..16: /mod_base="OTHER" /note="2'-OMe-nucleotide"
  modified_base 17..17: /mod_base="OTHER" /note="2'-OMe-nucleotide"
  modified_base 18..18: /mod_base="OTHER" /note="2'-OMe-nucleotide"
  modified_base 19..19: /mod_base="OTHER" /note="2'-OMe-nucleotide"
  modified_base 20..20: /mod_base="OTHER" /note="2'-OMe-nucleotide"
  misc_feature 20..21: /note="phosphorothioate bond"
  modified_base 21..21: /mod_base="OTHER" /note="2'-OMe-nucleotide"
  misc_feature 21..22: /note="phosphorothioate bond"
  modified_base 22..22: /mod_base="OTHER" /note="2'-OMe-nucleotide"
tttguauuaaauccuuaagaga

SEQ ID NO: 929 - DNA, 22 bp, Artificial Sequence
  Description of Artificial Sequence: Synthetic oligonucleotide
  Description of Combined DNA/RNA Molecule: Synthetic oligonucleotide
  N-term hydroxyl group
  C-term hydroxyl group
  modified_base 1..1: /mod_base="OTHER" /note="GalNAc-morpholino-thymidine analog 7"
  modified_base 2..2: /mod_base="OTHER" /note="GalNAc-morpholino-thymidine analog 7"
  modified_base 3..3: /mod_base="OTHER" /note="GalNAc-morpholino-thymidine analog 7"
  modified_base 4..4: /mod_base="OTHER" /note="2'-OMe-nucleotide"
  modified_base 5..5: /mod_base="OTHER" /note="2'-OMe-nucleotide"
  modified_base 6..6: /mod_base="OTHER" /note="2'-OMe-nucleotide"
  modified_base 7..7: /mod_base="OTHER" /note="2'-OMe-nucleotide"
  modified_base 8..8: /mod_base="OTHER" /note="2'-fluoro-nucleotide"
  modified_base 9..9: /mod_base="OTHER" /note="2'-OMe-nucleotide"
  modified_base 10..10: /mod_base="OTHER" /note="2'-fluoro-nucleotide"
  modified_base 11..11: /mod_base="OTHER" /note="2'-fluoro-nucleotide"
  modified_base 12..12: /mod_base="OTHER" /note="2'-fluoro-nucleotide"
  modified_base 13..13: /mod_base="OTHER" /note="2'-OMe-nucleotide"
  modified_base 14..14: /mod_base="OTHER" /note="2'-OMe-nucleotide"
  modified_base 15..15: /mod_base="OTHER" /note="2'-OMe-nucleotide"
  modified_base 16..16: /mod_base="OTHER" /note="2'-OMe-nucleotide"
  modified_base 17..17: /mod_base="OTHER" /note="2'-OMe-nucleotide"
  modified_base 18..18: /mod_base="OTHER" /note="2'-OMe-nucleotide"
  modified_base 19..19: /mod_base="OTHER" /note="2'-OMe-nucleotide"
  modified_base 20..20: /mod_base="OTHER" /note="2'-OMe-nucleotide"
  modified_base 21..21: /mod_base="OTHER" /note="Cyclohexane-morpholino-thymidine analog 4"
  modified_base 22..22: /mod_base="OTHER" /note="Cyclohexane-morpholino-thymidine analog 4"
tttguauuaaauccuuaagatt

SEQ ID NO: 930 - DNA, 22 bp, Artificial Sequence
  Description of Artificial Sequence: Synthetic oligonucleotide
  Description of Combined DNA/RNA Molecule: Synthetic oligonucleotide
  N-term hydroxyl group
  C-term hydroxyl group
  modified_base 1..1: /mod_base="OTHER" /note="GalNAc-morpholino-thymidine analog 7"
  modified_base 2..2: /mod_base="OTHER" /note="GalNAc-morpholino-thymidine analog 7"
  modified_base 3..3: /mod_base="OTHER" /note="GalNAc-morpholino-thymidine analog 7"
  modified_base 4..4: /mod_base="OTHER" /note="2'-OMe-nucleotide"
  modified_base 5..5: /mod_base="OTHER" /note="2'-OMe-nucleotide"
  modified_base 6..6: /mod_base="OTHER" /note="2'-OMe-nucleotide"
  modified_base 7..7: /mod_base="OTHER" /note="2'-OMe-nucleotide"
  modified_base 8..8: /mod_base="OTHER" /note="2'-fluoro-nucleotide"
  modified_base 9..9: /mod_base="OTHER" /note="2'-OMe-nucleotide"
  modified_base 10..10: /mod_base="OTHER" /note="2'-fluoro-nucleotide"
  modified_base 11..11: /mod_base="OTHER" /note="2'-fluoro-nucleotide"
  modified_base 12..12: /mod_base="OTHER" /note="2'-fluoro-nucleotide"
  modified_base 13..13: /mod_base="OTHER" /note="2'-OMe-nucleotide"
  modified_base 14..14: /mod_base="OTHER" /note="2'-OMe-nucleotide"
  modified_base 15..15: /mod_base="OTHER" /note="2'-OMe-nucleotide"
  modified_base 16..16: /mod_base="OTHER" /note="2'-OMe-nucleotide"
  modified_base 17..17: /mod_base="OTHER" /note="2'-OMe-nucleotide"
  modified_base 18..18: /mod_base="OTHER" /note="2'-OMe-nucleotide"
  modified_base 19..19: /mod_base="OTHER" /note="2'-OMe-nucleotide"
  modified_base 20..20: /mod_base="OTHER" /note="2'-OMe-nucleotide"
  modified_base 21..21: /mod_base="OTHER" /note="Cyclohexane-morpholino-thymidine analog 4"
  modified_base 22..22: /mod_base="OTHER" /note="Cyclohexane-morpholino-thymidine analog 4"
tttguauuaaauccuuaagatt

SEQ ID NO: 931 - DNA, 22 bp, Artificial Sequence
  Description of Artificial Sequence: Synthetic oligonucleotide
  Description of Combined DNA/RNA Molecule: Synthetic oligonucleotide
  N-term hydroxyl group
  C-term hydroxyl group
  modified_base 1..1: /mod_base="OTHER" /note="GalNAc-morpholino-thymidine analog 7"
  modified_base 2..2: /mod_base="OTHER" /note="GalNAc-morpholino-thymidine analog 7"
  modified_base 3..3: /mod_base="OTHER" /note="GalNAc-morpholino-thymidine analog 7"
  modified_base 4..4: /mod_base="OTHER" /note="2'-OMe-nucleotide"
  modified_base 5..5: /mod_base="OTHER" /note="2'-OMe-nucleotide"
  modified_base 6..6: /mod_base="OTHER" /note="2'-OMe-nucleotide"
  modified_base 7..7: /mod_base="OTHER" /note="2'-OMe-nucleotide"
  modified_base 8..8: /mod_base="OTHER" /note="2'-fluoro-nucleotide"
  modified_base 9..9: /mod_base="OTHER" /note="2'-OMe-nucleotide"
  modified_base 10..10: /mod_base="OTHER" /note="2'-fluoro-nucleotide"
  modified_base 11..11: /mod_base="OTHER" /note="2'-fluoro-nucleotide"
  modified_base 12..12: /mod_base="OTHER" /note="2'-fluoro-nucleotide"
  modified_base 13..13: /mod_base="OTHER" /note="2'-OMe-nucleotide"
  modified_base 14..14: /mod_base="OTHER" /note="2'-OMe-nucleotide"
  modified_base 15..15: /mod_base="OTHER" /note="2'-OMe-nucleotide"
  modified_base 16..16: /mod_base="OTHER" /note="2'-OMe-nucleotide"
  modified_base 17..17: /mod_base="OTHER" /note="2'-OMe-nucleotide"
  modified_base 18..18: /mod_base="OTHER" /note="2'-OMe-nucleotide"
  modified_base 19..19: /mod_base="OTHER" /note="2'-OMe-nucleotide"
  modified_base 20..20: /mod_base="OTHER" /note="2'-OMe-nucleotide"
  modified_base 21..21: /mod_base="OTHER" /note="Cyclohexane-morpholino-thymidine analog 4"
  modified_base 22..22: /mod_base="OTHER" /note="Cyclohexane-morpholino-thymidine analog 4"
tttguauuaaauccuuaagatt

SEQ ID NO: 932 - DNA, 22 bp, Artificial Sequence
  Description of Artificial Sequence: Synthetic oligonucleotide
  Description of Combined DNA/RNA Molecule: Synthetic oligonucleotide
  N-term hydroxyl group
  C-term hydroxyl group
  modified_base 1..1: /mod_base="OTHER" /note="GalNAc-morpholino-thymidine analog 7"
  modified_base 2..2: /mod_base="OTHER" /note="GalNAc-morpholino-thymidine analog 7"
  modified_base 3..3: /mod_base="OTHER" /note="GalNAc-morpholino-thymidine analog 7"
  modified_base 4..4: /mod_base="OTHER" /note="2'-OMe-nucleotide"
  modified_base 5..5: /mod_base="OTHER" /note="2'-OMe-nucleotide"
  modified_base 6..6: /mod_base="OTHER" /note="2'-OMe-nucleotide"
  modified_base 7..7: /mod_base="OTHER" /note="2'-OMe-nucleotide"
  modified_base 8..8: /mod_base="OTHER" /note="2'-fluoro-nucleotide"
  modified_base 9..9: /mod_base="OTHER" /note="2'-OMe-nucleotide"
  modified_base 10..10: /mod_base="OTHER" /note="2'-fluoro-nucleotide"
  modified_base 11..11: /mod_base="OTHER" /note="2'-fluoro-nucleotide"
  modified_base 12..12: /mod_base="OTHER" /note="2'-fluoro-nucleotide"
  modified_base 13..13: /mod_base="OTHER" /note="2'-OMe-nucleotide"
  modified_base 14..14: /mod_base="OTHER" /note="2'-OMe-nucleotide"
  modified_base 15..15: /mod_base="OTHER" /note="2'-OMe-nucleotide"
  modified_base 16..16: /mod_base="OTHER" /note="2'-OMe-nucleotide"
  modified_base 17..17: /mod_base="OTHER" /note="2'-OMe-nucleotide"
  modified_base 18..18: /mod_base="OTHER" /note="2'-OMe-nucleotide"
  modified_base 19..19: /mod_base="OTHER" /note="2'-OMe-nucleotide"
  modified_base 20..20: /mod_base="OTHER" /note="2'-OMe-nucleotide"
  modified_base 21..21: /mod_base="OTHER" /note="Cyclohexane-morpholino-thymidine analog 4"
  modified_base 22..22: /mod_base="OTHER" /note="Cyclohexane-morpholino-thymidine analog 4"
tttguauuaaauccuuaagatt

SEQ ID NO: 933 - DNA, 22 bp, Artificial Sequence
  Description of Artificial Sequence: Synthetic oligonucleotide
  Description of Combined DNA/RNA Molecule: Synthetic oligonucleotide
  N-term hydroxyl group
  C-term hydroxyl group
  modified_base 1..1: /mod_base="OTHER" /note="GalNAc-morpholino-thymidine analog 7"
  modified_base 2..2: /mod_base="OTHER" /note="GalNAc-morpholino-thymidine analog 7"
  modified_base 3..3: /mod_base="OTHER" /note="GalNAc-morpholino-thymidine analog 7"
  modified_base 4..4: /mod_base="OTHER" /note="Locked nucleic acid (LNA) nucleotide"
  modified_base 5..5: /mod_base="OTHER" /note="Locked nucleic acid (LNA) nucleotide"
  modified_base 6..6: /mod_base="OTHER" /note="2'-OMe-nucleotide"
  modified_base 7..7: /mod_base="OTHER" /note="2'-OMe-nucleotide"
  modified_base 8..8: /mod_base="OTHER" /note="2'-fluoro-nucleotide"
  modified_base 9..9: /mod_base="OTHER" /note="2'-OMe-nucleotide"
  modified_base 10..10: /mod_base="OTHER" /note="2'-fluoro-nucleotide"
  modified_base 11..11: /mod_base="OTHER" /note="2'-fluoro-nucleotide"
  modified_base 12..12: /mod_base="OTHER" /note="2'-fluoro-nucleotide"
  modified_base 13..13: /mod_base="OTHER" /note="2'-OMe-nucleotide"
  modified_base 14..14: /mod_base="OTHER" /note="2'-OMe-nucleotide"
  modified_base 15..15: /mod_base="OTHER" /note="2'-OMe-nucleotide"
  modified_base 16..16: /mod_base="OTHER" /note="2'-OMe-nucleotide"
  modified_base 17..17: /mod_base="OTHER" /note="2'-OMe-nucleotide"
  modified_base 18..18: /mod_base="OTHER" /note="2'-OMe-nucleotide"
  modified_base 19..19: /mod_base="OTHER" /note="2'-OMe-nucleotide"
  modified_base 20..20: /mod_base="OTHER" /note="2'-OMe-nucleotide"
  modified_base 21..21: /mod_base="OTHER" /note="Cyclohexane-morpholino-thymidine analog 4"
  modified_base 22..22: /mod_base="OTHER" /note="Cyclohexane-morpholino-thymidine analog 4"
tttguauuaaauccuuaagatt

SEQ ID NO: 934 - DNA, 22 bp, Artificial Sequence
  Description of Artificial Sequence: Synthetic oligonucleotide
  Description of Combined DNA/RNA Molecule: Synthetic oligonucleotide
  N-term hydroxyl group
  C-term hydroxyl group
  modified_base 1..1: /mod_base="OTHER" /note="GalNAc-morpholino-thymidine analog 7"
  modified_base 2..2: /mod_base="OTHER" /note="GalNAc-morpholino-thymidine analog 7"
  modified_base 3..3: /mod_base="OTHER" /note="GalNAc-morpholino-thymidine analog 7"
  modified_base 4..4: /mod_base="OTHER" /note="Locked nucleic acid (LNA) nucleotide"
  modified_base 5..5: /mod_base="OTHER" /note="Locked nucleic acid (LNA) nucleotide"
  modified_base 6..6: /mod_base="OTHER" /note="2'-OMe-nucleotide"
  modified_base 7..7: /mod_base="OTHER" /note="2'-OMe-nucleotide"
  modified_base 8..8: /mod_base="OTHER" /note="2'-fluoro-nucleotide"
  modified_base 9..9: /mod_base="OTHER" /note="2'-OMe-nucleotide"
  modified_base 10..10: /mod_base="OTHER" /note="2'-fluoro-nucleotide"
  modified_base 11..11: /mod_base="OTHER" /note="2'-fluoro-nucleotide"
  modified_base 12..12: /mod_base="OTHER" /note="2'-fluoro-nucleotide"
  modified_base 13..13: /mod_base="OTHER" /note="2'-OMe-nucleotide"
  modified_base 14..14: /mod_base="OTHER" /note="2'-OMe-nucleotide"
  modified_base 15..15: /mod_base="OTHER" /note="2'-OMe-nucleotide"
  modified_base 16..16: /mod_base="OTHER" /note="2'-OMe-nucleotide"
  modified_base 17..17: /mod_base="OTHER" /note="2'-OMe-nucleotide"
  modified_base 18..18: /mod_base="OTHER" /note="2'-OMe-nucleotide"
  modified_base 19..19: /mod_base="OTHER" /note="2'-OMe-nucleotide"
  modified_base 20..20: /mod_base="OTHER" /note="2'-OMe-nucleotide"
  modified_base 21..21: /mod_base="OTHER" /note="Cyclohexane-morpholino-thymidine analog 4"
  modified_base 22..22: /mod_base="OTHER" /note="Cyclohexane-morpholino-thymidine analog 4"
tttguauuaaauccuuaagatt

SEQ ID NO: 935 - DNA, 22 bp, Artificial Sequence
  Description of Artificial Sequence: Synthetic oligonucleotide
  Description of Combined DNA/RNA Molecule: Synthetic oligonucleotide
  N-term hydroxyl group
  C-term hydroxyl group
  modified_base 1..1: /mod_base="OTHER" /note="GalNAc-morpholino-thymidine analog 7"
  modified_base 2..2: /mod_base="OTHER" /note="GalNAc-morpholino-thymidine analog 7"
  modified_base 3..3: /mod_base="OTHER" /note="GalNAc-morpholino-thymidine analog 7"
  modified_base 4..4: /mod_base="OTHER" /note="Locked nucleic acid (LNA) nucleotide"
  modified_base 5..5: /mod_base="OTHER" /note="Locked nucleic acid (LNA) nucleotide"
  modified_base 6..6: /mod_base="OTHER" /note="2'-OMe-nucleotide"
  modified_base 7..7: /mod_base="OTHER" /note="2'-OMe-nucleotide"
  modified_base 8..8: /mod_base="OTHER" /note="2'-fluoro-nucleotide"
  modified_base 9..9: /mod_base="OTHER" /note="2'-OMe-nucleotide"
  modified_base 10..10: /mod_base="OTHER" /note="2'-fluoro-nucleotide"
  modified_base 11..11: /mod_base="OTHER" /note="2'-fluoro-nucleotide"
  modified_base 12..12: /mod_base="OTHER" /note="2'-fluoro-nucleotide"
  modified_base 13..13: /mod_base="OTHER" /note="2'-OMe-nucleotide"
  modified_base 14..14: /mod_base="OTHER" /note="2'-OMe-nucleotide"
  modified_base 15..15: /mod_base="OTHER" /note="2'-OMe-nucleotide"
  modified_base 16..16: /mod_base="OTHER" /note="2'-OMe-nucleotide"
  modified_base 17..17: /mod_base="OTHER" /note="2'-OMe-nucleotide"
  modified_base 18..18: /mod_base="OTHER" /note="2'-OMe-nucleotide"
  modified_base 19..19: /mod_base="OTHER" /note="2'-OMe-nucleotide"
  modified_base 20..20: /mod_base="OTHER" /note="2'-OMe-nucleotide"
  modified_base 21..21: /mod_base="OTHER" /note="Cyclohexane-morpholino-thymidine analog 4"
  modified_base 22..22: /mod_base="OTHER" /note="Cyclohexane-morpholino-thymidine analog 4"
tttguauuaaauccuuaagatt

SEQ ID NO: 936 - DNA, 22 bp, Artificial Sequence
  Description of Artificial Sequence: Synthetic oligonucleotide
  Description of Combined DNA/RNA Molecule: Synthetic oligonucleotide
  N-term hydroxyl group
  C-term hydroxyl group
  modified_base 1..1: /mod_base="OTHER" /note="GalNAc-morpholino-thymidine analog 7"
  modified_base 2..2: /mod_base="OTHER" /note="GalNAc-morpholino-thymidine analog 7"
  modified_base 3..3: /mod_base="OTHER" /note="GalNAc-morpholino-thymidine analog 7"
  modified_base 4..4: /mod_base="OTHER" /note="Locked nucleic acid (LNA) nucleotide"
  modified_base 5..5: /mod_base="OTHER" /note="Locked nucleic acid (LNA) nucleotide"
  modified_base 6..6: /mod_base="OTHER" /note="2'-OMe-nucleotide"
  modified_base 7..7: /mod_base="OTHER" /note="2'-OMe-nucleotide"
  modified_base 8..8: /mod_base="OTHER" /note="2'-fluoro-nucleotide"
  modified_base 9..9: /mod_base="OTHER" /note="2'-OMe-nucleotide"
  modified_base 10..10: /mod_base="OTHER" /note="2'-fluoro-nucleotide"
  modified_base 11..11: /mod_base="OTHER" /note="2'-fluoro-nucleotide"
  modified_base 12..12: /mod_base="OTHER" /note="2'-fluoro-nucleotide"
  modified_base 13..13: /mod_base="OTHER" /note="2'-OMe-nucleotide"
  modified_base 14..14: /mod_base="OTHER" /note="2'-OMe-nucleotide"
  modified_base 15..15: /mod_base="OTHER" /note="2'-OMe-nucleotide"
  modified_base 16..16: /mod_base="OTHER" /note="2'-OMe-nucleotide"
  modified_base 17..17: /mod_base="OTHER" /note="2'-OMe-nucleotide"
  modified_base 18..18: /mod_base="OTHER" /note="2'-OMe-nucleotide"
  modified_base 19..19: /mod_base="OTHER" /note="2'-OMe-nucleotide"
  modified_base 20..20: /mod_base="OTHER" /note="2'-OMe-nucleotide"
  modified_base 21..21: /mod_base="OTHER" /note="Cyclohexane-morpholino-thymidine analog 4"
  modified_base 22..22: /mod_base="OTHER" /note="Cyclohexane-morpholino-thymidine analog 4"
tttguauuaaauccuuaagatt

SEQ ID NO: 937 - DNA, 22 bp, Artificial Sequence
  Description of Artificial Sequence: Synthetic oligonucleotide
  Description of Combined DNA/RNA Molecule: Synthetic oligonucleotide
  N-term hydroxyl group
  C-term hydroxyl group
  modified_base 1..1: /mod_base="OTHER" /note="GalNAc-morpholino-thymidine analog 7"
  modified_base 2..2: /mod_base="OTHER" /note="GalNAc-morpholino-thymidine analog 7"
  modified_base 3..3: /mod_base="OTHER" /note="GalNAc-morpholino-thymidine analog 7"
  modified_base 4..4: /mod_base="OTHER" /note="2'-OMe-nucleotide"
  modified_base 5..5: /mod_base="OTHER" /note="2'-OMe-nucleotide"
  modified_base 6..6: /mod_base="OTHER" /note="2'-OMe-nucleotide"
  modified_base 7..7: /mod_base="OTHER" /note="2'-OMe-nucleotide"
  modified_base 8..8: /mod_base="OTHER" /note="2'-fluoro-nucleotide"
  modified_base 9..9: /mod_base="OTHER" /note="2'-OMe-nucleotide"
  modified_base 10..10: /mod_base="OTHER" /note="2'-fluoro-nucleotide"
  modified_base 11..11: /mod_base="OTHER" /note="2'-OMe-nucleotide"
  modified_base 12..12: /mod_base="OTHER" /note="2'-fluoro-nucleotide"
  modified_base 13..13: /mod_base="OTHER" /note="2'-fluoro-nucleotide"
  modified_base 14..14: /mod_base="OTHER" /note="2'-fluoro-nucleotide"
  modified_base 15..15: /mod_base="OTHER" /note="2'-OMe-nucleotide"
  modified_base 16..16: /mod_base="OTHER" /note="2'-OMe-nucleotide"
  modified_base 17..17: /mod_base="OTHER" /note="2'-OMe-nucleotide"
  modified_base 18..18: /mod_base="OTHER" /note="2'-OMe-nucleotide"
  modified_base 19..19: /mod_base="OTHER" /note="2'-OMe-nucleotide"
  modified_base 20..20: /mod_base="OTHER" /note="2'-OMe-nucleotide"
  modified_base 21..21: /mod_base="OTHER" /note="Cyclohexane-morpholino-thymidine analog 4"
  modified_base 22..22: /mod_base="OTHER" /note="Cyclohexane-morpholino-thymidine analog 4"
tttguauuaaauccuuaagatt

SEQ ID NO: 938 - DNA, 22 bp, Artificial Sequence
  Description of Artificial Sequence: Synthetic oligonucleotide
  Description of Combined DNA/RNA Molecule: Synthetic oligonucleotide
  N-term hydroxyl group
  C-term hydroxyl group
  modified_base 1..1: /mod_base="OTHER" /note="GalNAc-morpholino-thymidine analog 7"
  modified_base 2..2: /mod_base="OTHER" /note="GalNAc-morpholino-thymidine analog 7"
  modified_base 3..3: /mod_base="OTHER" /note="GalNAc-morpholino-thymidine analog 7"
  modified_base 4..4: /mod_base="OTHER" /note="2'-OMe-nucleotide"
  modified_base 5..5: /mod_base="OTHER" /note="2'-OMe-nucleotide"
  modified_base 6..6: /mod_base="OTHER" /note="2'-OMe-nucleotide"
  modified_base 7..7: /mod_base="OTHER" /note="2'-OMe-nucleotide"
  modified_base 8..8: /mod_base="OTHER" /note="2'-fluoro-nucleotide"
  modified_base 9..9: /mod_base="OTHER" /note="2'-OMe-nucleotide"
  modified_base 10..10: /mod_base="OTHER" /note="2'-fluoro-nucleotide"
  modified_base 11..11: /mod_base="OTHER" /note="2'-OMe-nucleotide"
  modified_base 12..12: /mod_base="OTHER" /note="2'-fluoro-nucleotide"
  modified_base 13..13: /mod_base="OTHER" /note="2'-fluoro-nucleotide"
  modified_base 14..14: /mod_base="OTHER" /note="2'-fluoro-nucleotide"
  modified_base 15..15: /mod_base="OTHER" /note="2'-OMe-nucleotide"
  modified_base 16..16: /mod_base="OTHER" /note="2'-OMe-nucleotide"
  modified_base 17..17: /mod_base="OTHER" /note="2'-OMe-nucleotide"
  modified_base 18..18: /mod_base="OTHER" /note="2'-OMe-nucleotide"
  modified_base 19..19: /mod_base="OTHER" /note="2'-OMe-nucleotide"
  modified_base 20..20: /mod_base="OTHER" /note="2'-OMe-nucleotide"
  modified_base 21..21: /mod_base="OTHER" /note="Cyclohexane-morpholino-thymidine analog 4"
  modified_base 22..22: /mod_base="OTHER" /note="Cyclohexane-morpholino-thymidine analog 4"
tttguauuaaauccuuaagatt

SEQ ID NO: 939 - DNA, 22 bp, Artificial Sequence
  Description of Artificial Sequence: Synthetic oligonucleotide
  Description of Combined DNA/RNA Molecule: Synthetic oligonucleotide
  N-term hydroxyl group
  C-term hydroxyl group
  modified_base 1..1: /mod_base="OTHER" /note="GalNAc-morpholino-thymidine analog 7"
  modified_base 2..2: /mod_base="OTHER" /note="GalNAc-morpholino-thymidine analog 7"
  modified_base 3..3: /mod_base="OTHER" /note="GalNAc-morpholino-thymidine analog 7"
  modified_base 4..4: /mod_base="OTHER" /note="2'-OMe-nucleotide"
  modified_base 5..5: /mod_base="OTHER" /note="2'-OMe-nucleotide"
  modified_base 6..6: /mod_base="OTHER" /note="2'-OMe-nucleotide"
  modified_base 7..7: /mod_base="OTHER" /note="2'-OMe-nucleotide"
  modified_base 8..8: /mod_base="OTHER" /note="2'-fluoro-nucleotide"
  modified_base 9..9: /mod_base="OTHER" /note="2'-OMe-nucleotide"
  modified_base 10..10: /mod_base="OTHER" /note="2'-fluoro-nucleotide"
  modified_base 11..11: /mod_base="OTHER" /note="2'-OMe-nucleotide"
  modified_base 12..12: /mod_base="OTHER" /note="2'-fluoro-nucleotide"
  modified_base 13..13: /mod_base="OTHER" /note="2'-fluoro-nucleotide"
  modified_base 14..14: /mod_base="OTHER" /note="2'-fluoro-nucleotide"
  modified_base 15..15: /mod_base="OTHER" /note="2'-OMe-nucleotide"
  modified_base 16..16: /mod_base="OTHER" /note="2'-OMe-nucleotide"
  modified_base 17..17: /mod_base="OTHER" /note="2'-OMe-nucleotide"
  modified_base 18..18: /mod_base="OTHER" /note="2'-OMe-nucleotide"
  modified_base 19..19: /mod_base="OTHER" /note="2'-OMe-nucleotide"
  modified_base 20..20: /mod_base="OTHER" /note="2'-OMe-nucleotide"
  modified_base 21..21: /mod_base="OTHER" /note="Cyclohexane-morpholino-thymidine analog 4"
  modified_base 22..22: /mod_base="OTHER" /note="Cyclohexane-morpholino-thymidine analog 4"
tttguauuaaauccuuaagatt

SEQ ID NO: 940 - DNA, 22 bp, Artificial Sequence
  Description of Artificial Sequence: Synthetic oligonucleotide
  Description of Combined DNA/RNA Molecule: Synthetic oligonucleotide
  N-term hydroxyl group
  C-term hydroxyl group
  modified_base 1..1: /mod_base="OTHER" /note="GalNAc-morpholino-thymidine analog 7"
  modified_base 2..2: /mod_base="OTHER" /note="GalNAc-morpholino-thymidine analog 7"
  modified_base 3..3: /mod_base="OTHER" /note="GalNAc-morpholino-thymidine analog 7"
  modified_base 4..4: /mod_base="OTHER" /note="2'-OMe-nucleotide"
  modified_base 5..5: /mod_base="OTHER" /note="2'-OMe-nucleotide"
  modified_base 6..6: /mod_base="OTHER" /note="2'-OMe-nucleotide"
  modified_base 7..7: /mod_base="OTHER" /note="2'-OMe-nucleotide"
  modified_base 8..8: /mod_base="OTHER" /note="2'-fluoro-nucleotide"
  modified_base 9..9: /mod_base="OTHER" /note="2'-OMe-nucleotide"
  modified_base 10..10: /mod_base="OTHER" /note="2'-fluoro-nucleotide"
  modified_base 11..11: /mod_base="OTHER" /note="2'-OMe-nucleotide"
  modified_base 12..12: /mod_base="OTHER" /note="2'-fluoro-nucleotide"
  modified_base 13..13: /mod_base="OTHER" /note="2'-fluoro-nucleotide"
  modified_base 14..14: /mod_base="OTHER" /note="2'-fluoro-nucleotide"
  modified_base 15..15: /mod_base="OTHER" /note="2'-OMe-nucleotide"
  modified_base 16..16: /mod_base="OTHER" /note="2'-OMe-nucleotide"
  modified_base 17..17: /mod_base="OTHER" /note="2'-OMe-nucleotide"
  modified_base 18..18: /mod_base="OTHER" /note="2'-OMe-nucleotide"
  modified_base 19..19: /mod_base="OTHER" /note="2'-OMe-nucleotide"
  modified_base 20..20: /mod_base="OTHER" /note="2'-OMe-nucleotide"
  modified_base 21..21: /mod_base="OTHER" /note="Cyclohexane-morpholino-thymidine analog 4"
  modified_base 22..22: /mod_base="OTHER" /note="Cyclohexane-morpholino-thymidine analog 4"
tttguauuaaauccuuaagatt

SEQ ID NO: 941 - DNA, 22 bp, Artificial Sequence
  Description of Artificial Sequence: Synthetic oligonucleotide
  Description of Combined DNA/RNA Molecule: Synthetic oligonucleotide
  N-term hydroxyl group
  C-term hydroxyl group
  modified_base 1..1: /mod_base="OTHER" /note="GalNAc-morpholino-thymidine analog 7"
  modified_base 2..2: /mod_base="OTHER" /note="GalNAc-morpholino-thymidine analog 7"
  modified_base 3..3: /mod_base="OTHER" /note="GalNAc-morpholino-thymidine analog 7"
  modified_base 4..4: /mod_base="OTHER" /note="2'-OMe-nucleotide"
  modified_base 5..5: /mod_base="OTHER" /note="2'-OMe-nucleotide"
  modified_base 6..6: /mod_base="OTHER" /note="2'-OMe-nucleotide"
  modified_base 7..7: /mod_base="OTHER" /note="2'-OMe-nucleotide"
  modified_base 8..8: /mod_base="OTHER" /note="2'-fluoro-nucleotide"
  modified_base 9..9: /mod_base="OTHER" /note="2'-OMe-nucleotide"
  modified_base 10..10: /mod_base="OTHER" /note="2'-fluoro-nucleotide"
  modified_base 11..11: /mod_base="OTHER" /note="2'-OMe-nucleotide"
  modified_base 12..12: /mod_base="OTHER" /note="2'-fluoro-nucleotide"
  modified_base 13..13: /mod_base="OTHER" /note="2'-fluoro-nucleotide"
  modified_base 14..14: /mod_base="OTHER" /note="2'-fluoro-nucleotide"
  modified_base 15..15: /mod_base="OTHER" /note="2'-OMe-nucleotide"
  modified_base 16..16: /mod_base="OTHER" /note="2'-OMe-nucleotide"
  modified_base 17..17: /mod_base="OTHER" /note="2'-OMe-nucleotide"
  modified_base 18..18: /mod_base="OTHER" /note="2'-OMe-nucleotide"
  modified_base 19..19: /mod_base="OTHER" /note="2'-OMe-nucleotide"
  modified_base 20..20: /mod_base="OTHER" /note="2'-OMe-nucleotide"
  modified_base 21..21: /mod_base="OTHER" /note="Cyclohexane-morpholino-thymidine analog 4"
  modified_base 22..22: /mod_base="OTHER" /note="Cyclohexane-morpholino-thymidine analog 4"
tttguauuaaauccuuaagatt

SEQ ID NO: 942 - DNA, 22 bp, Artificial Sequence
  Description of Artificial Sequence: Synthetic oligonucleotide
  Description of Combined DNA/RNA Molecule: Synthetic oligonucleotide
  N-term hydroxyl group
  C-term hydroxyl group
  modified_base 1..1: /mod_base="OTHER" /note="GalNAc-morpholino-thymidine analog 7"
  modified_base 2..2: /mod_base="OTHER" /note="GalNAc-morpholino-thymidine analog 7"
  modified_base 3..3: /mod_base="OTHER" /note="GalNAc-morpholino-thymidine analog 7"
  modified_base 4..4: /mod_base="OTHER" /note="Locked nucleic acid (LNA) nucleotide"
  modified_base 5..5: /mod_base="OTHER" /note="Locked nucleic acid (LNA) nucleotide"
  modified_base 6..6: /mod_base="OTHER" /note="2'-OMe-nucleotide"
  modified_base 7..7: /mod_base="OTHER" /note="2'-OMe-nucleotide"
  modified_base 8..8: /mod_base="OTHER" /note="2'-fluoro-nucleotide"
  modified_base 9..9: /mod_base="OTHER" /note="2'-OMe-nucleotide"
  modified_base 10..10: /mod_base="OTHER" /note="2'-fluoro-nucleotide"
  modified_base 11..11: /mod_base="OTHER" /note="2'-OMe-nucleotide"
  modified_base 12..12: /mod_base="OTHER" /note="2'-fluoro-nucleotide"
  modified_base 13..13: /mod_base="OTHER" /note="2'-fluoro-nucleotide"
  modified_base 14..14: /mod_base="OTHER" /note="2'-fluoro-nucleotide"
  modified_base 15..15: /mod_base="OTHER" /note="2'-OMe-nucleotide"
  modified_base 16..16: /mod_base="OTHER" /note="2'-OMe-nucleotide"
  modified_base 17..17: /mod_base="OTHER" /note="2'-OMe-nucleotide"
  modified_base 18..18: /mod_base="OTHER" /note="2'-OMe-nucleotide"
  modified_base 19..19: /mod_base="OTHER" /note="2'-OMe-nucleotide"
  modified_base 20..20: /mod_base="OTHER" /note="2'-OMe-nucleotide"
  modified_base 21..21: /mod_base="OTHER" /note="Cyclohexane-morpholino-thymidine analog 4"
  modified_base 22..22: /mod_base="OTHER" /note="Cyclohexane-morpholino-thymidine analog 4"
tttguauuaaauccuuaagatt

SEQ ID NO: 943 - DNA, 22 bp, Artificial Sequence
  Description of Artificial Sequence: Synthetic oligonucleotide
  Description of Combined DNA/RNA Molecule: Synthetic oligonucleotide
  N-term hydroxyl group
  C-term hydroxyl group
  modified_base 1..1: /mod_base="OTHER" /note="GalNAc-morpholino-thymidine analog 7"
  modified_base 2..2: /mod_base="OTHER" /note="GalNAc-morpholino-thymidine analog 7"
  modified_base 3..3: /mod_base="OTHER" /note="GalNAc-morpholino-thymidine analog 7"
  modified_base 4..4: /mod_base="OTHER" /note="Locked nucleic acid (LNA) nucleotide"
  modified_base 5..5: /mod_base="OTHER" /note="Locked nucleic acid (LNA) nucleotide"
  modified_base 6..6: /mod_base="OTHER" /note="2'-OMe-nucleotide"
  modified_base 7..7: /mod_base="OTHER" /note="2'-OMe-nucleotide"
  modified_base 8..8: /mod_base="OTHER" /note="2'-fluoro-nucleotide"
  modified_base 9..9: /mod_base="OTHER" /note="2'-OMe-nucleotide"
  modified_base 10..10: /mod_base="OTHER" /note="2'-fluoro-nucleotide"
  modified_base 11..11: /mod_base="OTHER" /note="2'-OMe-nucleotide"
  modified_base 12..12: /mod_base="OTHER" /note="2'-fluoro-nucleotide"
  modified_base 13..13: /mod_base="OTHER" /note="2'-fluoro-nucleotide"
  modified_base 14..14: /mod_base="OTHER" /note="2'-fluoro-nucleotide"
  modified_base 15..15: /mod_base="OTHER" /note="2'-OMe-nucleotide"
  modified_base 16..16: /mod_base="OTHER" /note="2'-OMe-nucleotide"
  modified_base 17..17: /mod_base="OTHER" /note="2'-OMe-nucleotide"
  modified_base 18..18: /mod_base="OTHER" /note="2'-OMe-nucleotide"
  modified_base 19..19: /mod_base="OTHER" /note="2'-OMe-nucleotide"
  modified_base 20..20: /mod_base="OTHER" /note="2'-OMe-nucleotide"
  modified_base 21..21: /mod_base="OTHER" /note="Cyclohexane-morpholino-thymidine analog 4"
  modified_base 22..22: /mod_base="OTHER" /note="Cyclohexane-morpholino-thymidine analog 4"
tttguauuaaauccuuaagatt

SEQ ID NO: 944 - DNA, 22 bp, Artificial Sequence
  Description of Artificial Sequence: Synthetic oligonucleotide
  Description of Combined DNA/RNA Molecule: Synthetic oligonucleotide
  N-term hydroxyl group
  C-term hydroxyl group
  modified_base 1..1: /mod_base="OTHER" /note="GalNAc-morpholino-thymidine analog 7"
  modified_base 2..2: /mod_base="OTHER" /note="GalNAc-morpholino-thymidine analog 7"
  modified_base 3..3: /mod_base="OTHER" /note="GalNAc-morpholino-thymidine analog 7"
  modified_base 4..4: /mod_base="OTHER" /note="Locked nucleic acid (LNA) nucleotide"
  modified_base 5..5: /mod_base="OTHER" /note="Locked nucleic acid (LNA) nucleotide"
  modified_base 6..6: /mod_base="OTHER" /note="2'-OMe-nucleotide"
  modified_base 7..7: /mod_base="OTHER" /note="2'-OMe-nucleotide"
  modified_base 8..8: /mod_base="OTHER" /note="2'-fluoro-nucleotide"
  modified_base 9..9: /mod_base="OTHER" /note="2'-OMe-nucleotide"
  modified_base 10..10: /mod_base="OTHER" /note="2'-fluoro-nucleotide"
  modified_base 11..11: /mod_base="OTHER" /note="2'-OMe-nucleotide"
  modified_base 12..12: /mod_base="OTHER" /note="2'-fluoro-nucleotide"
  modified_base 13..13: /mod_base="OTHER" /note="2'-fluoro-nucleotide"
  modified_base 14..14: /mod_base="OTHER" /note="2'-fluoro-nucleotide"
  modified_base 15..15: /mod_base="OTHER" /note="2'-OMe-nucleotide"
  modified_base 16..16: /mod_base="OTHER" /note="2'-OMe-nucleotide"
  modified_base 17..17: /mod_base="OTHER" /note="2'-OMe-nucleotide"
  modified_base 18..18: /mod_base="OTHER" /note="2'-OMe-nucleotide"
  modified_base 19..19: /mod_base="OTHER" /note="2'-OMe-nucleotide"
  modified_base 20..20: /mod_base="OTHER" /note="2'-OMe-nucleotide"
  modified_base 21..21: /mod_base="OTHER" /note="Cyclohexane-morpholino-thymidine analog 4"
  modified_base 22..22: /mod_base="OTHER" /note="Cyclohexane-morpholino-thymidine analog 4"
tttguauuaaauccuuaagatt

SEQ ID NO: 945 - DNA, 22 bp, Artificial Sequence
  Description of Artificial Sequence: Synthetic oligonucleotide
  Description of Combined DNA/RNA Molecule: Synthetic oligonucleotide
  N-term hydroxyl group
  C-term hydroxyl group
  modified_base 1..1: /mod_base="OTHER" /note="GalNAc-morpholino-thymidine analog 7"
  modified_base 2..2: /mod_base="OTHER" /note="GalNAc-morpholino-thymidine analog 7"
  modified_base 3..3: /mod_base="OTHER" /note="GalNAc-morpholino-thymidine analog 7"
  modified_base 4..4: /mod_base="OTHER" /note="Locked nucleic acid (LNA) nucleotide"
  modified_base 5..5: /mod_base="OTHER" /note="Locked nucleic acid (LNA) nucleotide"
  modified_base 6..6: /mod_base="OTHER" /note="2'-OMe-nucleotide"
  modified_base 7..7: /mod_base="OTHER" /note="2'-OMe-nucleotide"
  modified_base 8..8: /mod_base="OTHER" /note="2'-fluoro-nucleotide"
  modified_base 9..9: /mod_base="OTHER" /note="2'-OMe-nucleotide"
  modified_base 10..10: /mod_base="OTHER" /note="2'-fluoro-nucleotide"
  modified_base 11..11: /mod_base="OTHER" /note="2'-OMe-nucleotide"
  modified_base 12..12: /mod_base="OTHER" /note="2'-fluoro-nucleotide"
  modified_base 13..13: /mod_base="OTHER" /note="2'-fluoro-nucleotide"
  modified_base 14..14: /mod_base="OTHER" /note="2'-fluoro-nucleotide"
  modified_base 15..15: /mod_base="OTHER" /note="2'-OMe-nucleotide"
  modified_base 16..16: /mod_base="OTHER" /note="2'-OMe-nucleotide"
  modified_base 17..17: /mod_base="OTHER" /note="2'-OMe-nucleotide"
  modified_base 18..18: /mod_base="OTHER" /note="2'-OMe-nucleotide"
  modified_base 19..19: /mod_base="OTHER" /note="2'-OMe-nucleotide"
  modified_base 20..20: /mod_base="OTHER" /note="2'-OMe-nucleotide"
  modified_base 21..21: /mod_base="OTHER" /note="Cyclohexane-morpholino-thymidine analog 4"
  modified_base 22..22: /mod_base="OTHER" /note="Cyclohexane-morpholino-thymidine analog 4"
tttguauuaaauccuuaagatt

SEQ ID NO: 946 - DNA, 22 bp, Artificial Sequence
  Description of Artificial Sequence: Synthetic oligonucleotide
  Description of Combined DNA/RNA Molecule: Synthetic oligonucleotide
  N-term hydroxyl group
  C-term hydroxyl group
  modified_base 1..1: /mod_base="OTHER" /note="GalNAc-morpholino-thymidine analog 7"
  modified_base 2..2: /mod_base="OTHER" /note="GalNAc-morpholino-thymidine analog 7"
  modified_base 3..3: /mod_base="OTHER" /note="GalNAc-morpholino-thymidine analog 7"
  modified_base 4..4: /mod_base="OTHER" /note="Locked nucleic acid (LNA) nucleotide"
  modified_base 5..5: /mod_base="OTHER" /note="Locked nucleic acid (LNA) nucleotide"
  modified_base 6..6: /mod_base="OTHER" /note="2'-OMe-nucleotide"
  modified_base 7..7: /mod_base="OTHER" /note="2'-OMe-nucleotide"
  modified_base 8..8: /mod_base="OTHER" /note="2'-fluoro-nucleotide"
  modified_base 9..9: /mod_base="OTHER" /note="2'-OMe-nucleotide"
  modified_base 10..10: /mod_base="OTHER" /note="2'-fluoro-nucleotide"
  modified_base 11..11: /mod_base="OTHER" /note="2'-OMe-nucleotide"
  modified_base 12..12: /mod_base="OTHER" /note="2'-fluoro-nucleotide"
  modified_base 13..13: /mod_base="OTHER" /note="2'-fluoro-nucleotide"
  modified_base 14..14: /mod_base="OTHER" /note="2'-fluoro-nucleotide"
  modified_base 15..15: /mod_base="OTHER" /note="2'-OMe-nucleotide"
  modified_base 16..16: /mod_base="OTHER" /note="2'-OMe-nucleotide"
  modified_base 17..17: /mod_base="OTHER" /note="2'-OMe-nucleotide"
  modified_base 18..18: /mod_base="OTHER" /note="2'-OMe-nucleotide"
  modified_base 19..19: /mod_base="OTHER" /note="2'-OMe-nucleotide"
  modified_base 20..20: /mod_base="OTHER" /note="2'-OMe-nucleotide"
  modified_base 21..21: /mod_base="OTHER" /note="Cyclohexane-morpholino-thymidine analog 4"
  modified_base 22..22: /mod_base="OTHER" /note="Cyclohexane-morpholino-thymidine analog 4"
tttguauuaaauccuuaagatt

SEQ ID NO: 947 - DNA, 24 bp, Artificial Sequence
  Description of Artificial Sequence: Synthetic oligonucleotide
  Description of Combined DNA/RNA Molecule: Synthetic oligonucleotide
  N-term hydroxyl group
  C-term hydroxyl group
  modified_base 1..1: /mod_base="OTHER" /note="GalNAc-morpholino-thymidine analog 7"
  modified_base 2..2: /mod_base="OTHER" /note="GalNAc-morpholino-thymidine analog 7"
  modified_base 3..3: /mod_base="OTHER" /note="GalNAc-morpholino-thymidine analog 7"
  modified_base 4..4: /mod_base="OTHER" /note="2'-OMe-nucleotide"
  modified_base 5..5: /mod_base="OTHER" /note="2'-OMe-nucleotide"
  modified_base 6..6: /mod_base="OTHER" /note="2'-OMe-nucleotide"
  modified_base 7..7: /mod_base="OTHER" /note="2'-OMe-nucleotide"
  modified_base 8..8: /mod_base="OTHER" /note="2'-fluoro-nucleotide"
  modified_base 9..9: /mod_base="OTHER" /note="2'-OMe-nucleotide"
  modified_base 10..10: /mod_base="OTHER" /note="2'-fluoro-nucleotide"
  modified_base 11..11: /mod_base="OTHER" /note="2'-fluoro-nucleotide"
  modified_base 12..12: /mod_base="OTHER" /note="2'-fluoro-nucleotide"
  modified_base 13..13: /mod_base="OTHER" /note="2'-OMe-nucleotide"
  modified_base 14..14: /mod_base="OTHER" /note="2'-OMe-nucleotide"
  modified_base 15..15: /mod_base="OTHER" /note="2'-OMe-nucleotide"
  modified_base 16..16: /mod_base="OTHER" /note="2'-OMe-nucleotide"
  modified_base 17..17: /mod_base="OTHER" /note="2'-OMe-nucleotide"
  modified_base 18..18: /mod_base="OTHER" /note="2'-OMe-nucleotide"
  modified_base 19..19: /mod_base="OTHER" /note="2'-OMe-nucleotide"
  modified_base 20..20: /mod_base="OTHER" /note="2'-OMe-nucleotide"
  modified_base 21..21: /mod_base="OTHER" /note="2'-OMe-nucleotide"
  modified_base 22..22: /mod_base="OTHER" /note="2'-OMe-nucleotide"
  modified_base 23..23: /mod_base="OTHER" /note="Cyclohexane-morpholino-thymidine analog 4"
  modified_base 24..24: /mod_base="OTHER" /note="Cyclohexane-morpholino-thymidine analog 4"
tttguauuaaauccuuaagagatt

SEQ ID NO: 948 - DNA, 24 bp, Artificial Sequence
  Description of Artificial Sequence: Synthetic oligonucleotide
  Description of Combined DNA/RNA Molecule: Synthetic oligonucleotide
  N-term hydroxyl group
  C-term hydroxyl group
  modified_base 1..1: /mod_base="OTHER" /note="GalNAc-morpholino-thymidine analog 7"
  modified_base 2..2: /mod_base="OTHER" /note="GalNAc-morpholino-thymidine analog 7"
  modified_base 3..3: /mod_base="OTHER" /note="GalNAc-morpholino-thymidine analog 7"
  modified_base 4..4: /mod_base="OTHER" /note="2'-OMe-nucleotide"
  modified_base 5..5: /mod_base="OTHER" /note="2'-OMe-nucleotide"
  modified_base 6..6: /mod_base="OTHER" /note="2'-OMe-nucleotide"
  modified_base 7..7: /mod_base="OTHER" /note="2'-OMe-nucleotide"
  modified_base 8..8: /mod_base="OTHER" /note="2'-fluoro-nucleotide"
  modified_base 9..9: /mod_base="OTHER" /note="2'-OMe-nucleotide"
  modified_base 10..10: /mod_base="OTHER" /note="2'-fluoro-nucleotide"
  modified_base 11..11: /mod_base="OTHER" /note="2'-fluoro-nucleotide"
  modified_base 12..12: /mod_base="OTHER" /note="2'-fluoro-nucleotide"
  modified_base 13..13: /mod_base="OTHER" /note="2'-OMe-nucleotide"
  modified_base 14..14: /mod_base="OTHER" /note="2'-OMe-nucleotide"
  modified_base 15..15: /mod_base="OTHER" /note="2'-OMe-nucleotide"
  modified_base 16..16: /mod_base="OTHER" /note="2'-OMe-nucleotide"
  modified_base 17..17: /mod_base="OTHER" /note="2'-OMe-nucleotide"
  modified_base 18..18: /mod_base="OTHER" /note="2'-OMe-nucleotide"
  modified_base 19..19: /mod_base="OTHER" /note="2'-OMe-nucleotide"
  modified_base 20..20: /mod_base="OTHER" /note="2'-OMe-nucleotide"
  modified_base 21..21: /mod_base="OTHER" /note="2'-OMe-nucleotide"
  modified_base 22..22: /mod_base="OTHER" /note="2'-OMe-nucleotide"
  modified_base 23..23: /mod_base="OTHER" /note="Cyclohexane-morpholino-thymidine analog 4"
  modified_base 24..24: /mod_base="OTHER" /note="Cyclohexane-morpholino-thymidine analog 4"
tttguauuaaauccuuaagagatt

SEQ ID NO: 949 - DNA, 24 bp, Artificial Sequence
  Description of Artificial Sequence: Synthetic oligonucleotide
  Description of Combined DNA/RNA Molecule: Synthetic oligonucleotide
  N-term hydroxyl group
  C-term hydroxyl group
  modified_base 1..1: /mod_base="OTHER" /note="GalNAc-morpholino-thymidine analog 7"
  modified_base 2..2: /mod_base="OTHER" /note="GalNAc-morpholino-thymidine analog 7"
  modified_base 3..3: /mod_base="OTHER" /note="GalNAc-morpholino-thymidine analog 7"
  modified_base 4..4: /mod_base="OTHER" /note="2'-OMe-nucleotide"
  modified_base 5..5: /mod_base="OTHER" /note="2'-OMe-nucleotide"
  modified_base 6..6: /mod_base="OTHER" /note="2'-OMe-nucleotide"
  modified_base 7..7: /mod_base="OTHER" /note="2'-OMe-nucleotide"
  modified_base 8..8: /mod_base="OTHER" /note="2'-fluoro-nucleotide"
  modified_base 9..9: /mod_base="OTHER" /note="2'-OMe-nucleotide"
  modified_base 10..10: /mod_base="OTHER" /note="2'-fluoro-nucleotide"
  modified_base 11..11: /mod_base="OTHER" /note="2'-fluoro-nucleotide"
  modified_base 12..12: /mod_base="OTHER" /note="2'-fluoro-nucleotide"
  modified_base 13..13: /mod_base="OTHER" /note="2'-OMe-nucleotide"
  modified_base 14..14: /mod_base="OTHER" /note="2'-OMe-nucleotide"
  modified_base 15..15: /mod_base="OTHER" /note="2'-OMe-nucleotide"
  modified_base 16..16: /mod_base="OTHER" /note="2'-OMe-nucleotide"
  modified_base 17..17: /mod_base="OTHER" /note="2'-OMe-nucleotide"
  modified_base 18..18: /mod_base="OTHER" /note="2'-OMe-nucleotide"
  modified_base 19..19: /mod_base="OTHER" /note="2'-OMe-nucleotide"
  modified_base 20..20: /mod_base="OTHER" /note="2'-OMe-nucleotide"
  modified_base 21..21: /mod_base="OTHER" /note="2'-OMe-nucleotide"
  modified_base 22..22: /mod_base="OTHER" /note="2'-OMe-nucleotide"
  modified_base 23..23: /mod_base="OTHER" /note="Cyclohexane-morpholino-thymidine analog 4"
  modified_base 24..24: /mod_base="OTHER" /note="Cyclohexane-morpholino-thymidine analog 4"
tttguauuaaauccuuaagagatt

SEQ ID NO: 950 - DNA, 24 bp, Artificial Sequence
  Description of Artificial Sequence: Synthetic oligonucleotide
  Description of Combined DNA/RNA Molecule: Synthetic oligonucleotide
  N-term hydroxyl group
  C-term hydroxyl group
  modified_base 1..1: /mod_base="OTHER" /note="GalNAc-morpholino-thymidine analog 7"
  modified_base 2..2: /mod_base="OTHER" /note="GalNAc-morpholino-thymidine analog 7"
  modified_base 3..3: /mod_base="OTHER" /note="GalNAc-morpholino-thymidine analog 7"
  modified_base 4..4: /mod_base="OTHER" /note="2'-OMe-nucleotide"
  modified_base 5..5: /mod_base="OTHER" /note="2'-OMe-nucleotide"
  modified_base 6..6: /mod_base="OTHER" /note="2'-OMe-nucleotide"
  modified_base 7..7: /mod_base="OTHER" /note="2'-OMe-nucleotide"
  modified_base 8..8: /mod_base="OTHER" /note="2'-fluoro-nucleotide"
  modified_base 9..9: /mod_base="OTHER" /note="2'-OMe-nucleotide"
  modified_base 10..10: /mod_base="OTHER" /note="2'-fluoro-nucleotide"
  modified_base 11..11: /mod_base="OTHER" /note="2'-fluoro-nucleotide"
  modified_base 12..12: /mod_base="OTHER" /note="2'-fluoro-nucleotide"
  modified_base 13..13: /mod_base="OTHER" /note="2'-OMe-nucleotide"
  modified_base 14..14: /mod_base="OTHER" /note="2'-OMe-nucleotide"
  modified_base 15..15: /mod_base="OTHER" /note="2'-OMe-nucleotide"
  modified_base 16..16: /mod_base="OTHER" /note="2'-OMe-nucleotide"
  modified_base 17..17: /mod_base="OTHER" /note="2'-OMe-nucleotide"
  modified_base 18..18: /mod_base="OTHER" /note="2'-OMe-nucleotide"
  modified_base 19..19: /mod_base="OTHER" /note="2'-OMe-nucleotide"
  modified_base 20..20: /mod_base="OTHER" /note="2'-OMe-nucleotide"
  modified_base 21..21: /mod_base="OTHER" /note="2'-OMe-nucleotide"
  modified_base 22..22: /mod_base="OTHER" /note="2'-OMe-nucleotide"
  modified_base 23..23: /mod_base="OTHER" /note="Cyclohexane-morpholino-thymidine analog 4"
  modified_base 24..24: /mod_base="OTHER" /note="Cyclohexane-morpholino-thymidine analog 4"
tttguauuaaauccuuaagagatt

SEQ ID NO: 951 - DNA, 24 bp, Artificial Sequence
  Description of Artificial Sequence: Synthetic oligonucleotide
  Description of Combined DNA/RNA Molecule: Synthetic oligonucleotide
  N-term hydroxyl group
  C-term hydroxyl group
  modified_base 1..1: /mod_base="OTHER" /note="GalNAc-morpholino-thymidine analog 7"
  modified_base 2..2: /mod_base="OTHER" /note="GalNAc-morpholino-thymidine analog 7"
  modified_base 3..3: /mod_base="OTHER" /note="GalNAc-morpholino-thymidine analog 7"
  modified_base 4..4: /mod_base="OTHER" /note="Locked nucleic acid (LNA) nucleotide"
  modified_base 5..5: /mod_base="OTHER" /note="Locked nucleic acid (LNA) nucleotide"
  modified_base 6..6: /mod_base="OTHER" /note="2'-OMe-nucleotide"
  modified_base 7..7: /mod_base="OTHER" /note="2'-OMe-nucleotide"
  modified_base 8..8: /mod_base="OTHER" /note="2'-fluoro-nucleotide"
  modified_base 9..9: /mod_base="OTHER" /note="2'-OMe-nucleotide"
  modified_base 10..10: /mod_base="OTHER" /note="2'-fluoro-nucleotide"
  modified_base 11..11: /mod_base="OTHER" /note="2'-fluoro-nucleotide"
  modified_base 12..12: /mod_base="OTHER" /note="2'-fluoro-nucleotide"
  modified_base 13..13: /mod_base="OTHER" /note="2'-OMe-nucleotide"
  modified_base 14..14: /mod_base="OTHER" /note="2'-OMe-nucleotide"
  modified_base 15..15: /mod_base="OTHER" /note="2'-OMe-nucleotide"
  modified_base 16..16: /mod_base="OTHER" /note="2'-OMe-nucleotide"
  modified_base 17..17: /mod_base="OTHER" /note="2'-OMe-nucleotide"
  modified_base 18..18: /mod_base="OTHER" /note="2'-OMe-nucleotide"
  modified_base 19..19: /mod_base="OTHER" /note="2'-OMe-nucleotide"
  modified_base 20..20: /mod_base="OTHER" /note="2'-OMe-nucleotide"
  modified_base 21..21: /mod_base="OTHER" /note="2'-OMe-nucleotide"
  modified_base 22..22: /mod_base="OTHER" /note="2'-OMe-nucleotide"
  modified_base 23..23: /mod_base="OTHER" /note="Cyclohexane-morpholino-thymidine analog 4"
  modified_base 24..24: /mod_base="OTHER" /note="Cyclohexane-morpholino-thymidine analog 4"
tttguauuaaauccuuaagagatt

SEQ ID NO: 952 - DNA, 24 bp, Artificial Sequence
  Description of Artificial Sequence: Synthetic oligonucleotide
  Description of Combined DNA/RNA Molecule: Synthetic oligonucleotide
  N-term hydroxyl group
  C-term hydroxyl group
  modified_base 1..1: /mod_base="OTHER" /note="GalNAc-morpholino-thymidine analog 7"
  modified_base 2..2: /mod_base="OTHER" /note="GalNAc-morpholino-thymidine analog 7"
  modified_base 3..3: /mod_base="OTHER" /note="GalNAc-morpholino-thymidine analog 7"
  modified_base 4..4: /mod_base="OTHER" /note="Locked nucleic acid (LNA) nucleotide"
  modified_base 5..5: /mod_base="OTHER" /note="Locked nucleic acid (LNA) nucleotide"
  modified_base 6..6: /mod_base="OTHER" /note="2'-OMe-nucleotide"
  modified_base 7..7: /mod_base="OTHER" /note="2'-OMe-nucleotide"
  modified_base 8..8: /mod_base="OTHER" /note="2'-fluoro-nucleotide"
  modified_base 9..9: /mod_base="OTHER" /note="2'-OMe-nucleotide"
  modified_base 10..10: /mod_base="OTHER" /note="2'-fluoro-nucleotide"
  modified_base 11..11: /mod_base="OTHER" /note="2'-fluoro-nucleotide"
  modified_base 12..12: /mod_base="OTHER" /note="2'-fluoro-nucleotide"
  modified_base 13..13: /mod_base="OTHER" /note="2'-OMe-nucleotide"
  modified_base 14..14: /mod_base="OTHER" /note="2'-OMe-nucleotide"
  modified_base 15..15: /mod_base="OTHER" /note="2'-OMe-nucleotide"
  modified_base 16..16: /mod_base="OTHER" /note="2'-OMe-nucleotide"
  modified_base 17..17: /mod_base="OTHER" /note="2'-OMe-nucleotide"
  modified_base 18..18: /mod_base="OTHER" /note="2'-OMe-nucleotide"
  modified_base 19..19: /mod_base="OTHER" /note="2'-OMe-nucleotide"
  modified_base 20..20: /mod_base="OTHER" /note="2'-OMe-nucleotide"
  modified_base 21..21: /mod_base="OTHER" /note="2'-OMe-nucleotide"
  modified_base 22..22: /mod_base="OTHER" /note="2'-OMe-nucleotide"
  modified_base 23..23: /mod_base="OTHER" /note="Cyclohexane-morpholino-thymidine analog 4"
  modified_base 24..24: /mod_base="OTHER" /note="Cyclohexane-morpholino-thymidine analog 4"
tttguauuaaauccuuaagagatt

SEQ ID NO: 953 - DNA, 24 bp, Artificial Sequence
  Description of Artificial Sequence: Synthetic oligonucleotide
  Description of Combined DNA/RNA Molecule: Synthetic oligonucleotide
  N-term hydroxyl group
  C-term hydroxyl group
  modified_base 1..1: /mod_base="OTHER" /note="GalNAc-morpholino-thymidine analog 7"
  modified_base 2..2: /mod_base="OTHER" /note="GalNAc-morpholino-thymidine analog 7"
  modified_base 3..3: /mod_base="OTHER" /note="GalNAc-morpholino-thymidine analog 7"
  modified_base 4..4: /mod_base="OTHER" /note="Locked nucleic acid (LNA) nucleotide"
  modified_base 5..5: /mod_base="OTHER" /note="Locked nucleic acid (LNA) nucleotide"
  modified_base 6..6: /mod_base="OTHER" /note="2'-OMe-nucleotide"
  modified_base 7..7: /mod_base="OTHER" /note="2'-OMe-nucleotide"
  modified_base 8..8: /mod_base="OTHER" /note="2'-fluoro-nucleotide"
  modified_base 9..9: /mod_base="OTHER" /note="2'-OMe-nucleotide"
  modified_base 10..10: /mod_base="OTHER" /note="2'-fluoro-nucleotide"
  modified_base 11..11: /mod_base="OTHER" /note="2'-fluoro-nucleotide"
  modified_base 12..12: /mod_base="OTHER" /note="2'-fluoro-nucleotide"
  modified_base 13..13: /mod_base="OTHER" /note="2'-OMe-nucleotide"
  modified_base 14..14: /mod_base="OTHER" /note="2'-OMe-nucleotide"
  modified_base 15..15: /mod_base="OTHER" /note="2'-OMe-nucleotide"
  modified_base 16..16: /mod_base="OTHER" /note="2'-OMe-nucleotide"
  modified_base 17..17: /mod_base="OTHER" /note="2'-OMe-nucleotide"
  modified_base 18..18: /mod_base="OTHER" /note="2'-OMe-nucleotide"
  modified_base 19..19: /mod_base="OTHER" /note="2'-OMe-nucleotide"
  modified_base 20..20: /mod_base="OTHER" /note="2'-OMe-nucleotide"
  modified_base 21..21: /mod_base="OTHER" /note="2'-OMe-nucleotide"
  modified_base 22..22: /mod_base="OTHER" /note="2'-OMe-nucleotide"
  modified_base 23..23: /mod_base="OTHER" /note="Cyclohexane-morpholino-thymidine analog 4"
  modified_base 24..24: /mod_base="OTHER" /note="Cyclohexane-morpholino-thymidine analog 4"
tttguauuaaauccuuaagagatt

SEQ ID NO: 954 - DNA, 24 bp, Artificial Sequence
  Description of Artificial Sequence: Synthetic oligonucleotide
  Description of Combined DNA/RNA Molecule: Synthetic oligonucleotide
  N-term hydroxyl group
  C-term hydroxyl group
  modified_base 1..1: /mod_base="OTHER" /note="GalNAc-morpholino-thymidine analog 7"
  modified_base 2..2: /mod_base="OTHER" /note="GalNAc-morpholino-thymidine analog 7"
  modified_base 3..3: /mod_base="OTHER" /note="GalNAc-morpholino-thymidine analog 7"
  modified_base 4..4: /mod_base="OTHER" /note="Locked nucleic acid (LNA) nucleotide"
  modified_base 5..5: /mod_base="OTHER" /note="Locked nucleic acid (LNA) nucleotide"
  modified_base 6..6: /mod_base="OTHER" /note="2'-OMe-nucleotide"
  modified_base 7..7: /mod_base="OTHER" /note="2'-OMe-nucleotide"
  modified_base 8..8: /mod_base="OTHER" /note="2'-fluoro-nucleotide"
  modified_base 9..9: /mod_base="OTHER" /note="2'-OMe-nucleotide"
  modified_base 10..10: /mod_base="OTHER" /note="2'-fluoro-nucleotide"
  modified_base 11..11: /mod_base="OTHER" /note="2'-fluoro-nucleotide"
  modified_base 12..12: /mod_base="OTHER" /note="2'-fluoro-nucleotide"
  modified_base 13..13: /mod_base="OTHER" /note="2'-OMe-nucleotide"
  modified_base 14..14: /mod_base="OTHER" /note="2'-OMe-nucleotide"
  modified_base 15..15: /mod_base="OTHER" /note="2'-OMe-nucleotide"
  modified_base 16..16: /mod_base="OTHER" /note="2'-OMe-nucleotide"
  modified_base 17..17: /mod_base="OTHER" /note="2'-OMe-nucleotide"
  modified_base 18..18: /mod_base="OTHER" /note="2'-OMe-nucleotide"
  modified_base 19..19: /mod_base="OTHER" /note="2'-OMe-nucleotide"
  modified_base 20..20: /mod_base="OTHER" /note="2'-OMe-nucleotide"
  modified_base 21..21: /mod_base="OTHER" /note="2'-OMe-nucleotide"
  modified_base 22..22: /mod_base="OTHER" /note="2'-OMe-nucleotide"
  modified_base 23..23: /mod_base="OTHER" /note="Cyclohexane-morpholino-thymidine analog 4"
  modified_base 24..24: /mod_base="OTHER" /note="Cyclohexane-morpholino-thymidine analog 4"
tttguauuaaauccuuaagagatt

SEQ ID NO: 955 - DNA, 24 bp, Artificial Sequence
  Description of Artificial Sequence: Synthetic oligonucleotide
  Description of Combined DNA/RNA Molecule: Synthetic oligonucleotide
  N-term hydroxyl group
  C-term hydroxyl group
  modified_base 1..1: /mod_base="OTHER" /note="GalNAc-morpholino-thymidine analog 7"
  modified_base 2..2: /mod_base="OTHER" /note="GalNAc-morpholino-thymidine analog 7"
  modified_base 3..3: /mod_base="OTHER" /note="GalNAc-morpholino-thymidine analog 7"
  modified_base 4..4: /mod_base="OTHER" /note="2'-OMe-nucleotide"
  modified_base 5..5: /mod_base="OTHER" /note="2'-OMe-nucleotide"
  modified_base 6..6: /mod_base="OTHER" /note="2'-OMe-nucleotide"
  modified_base 7..7: /mod_base="OTHER" /note="2'-OMe-nucleotide"
  modified_base 8..8: /mod_base="OTHER" /note="2'-fluoro-nucleotide"
  modified_base 9..9: /mod_base="OTHER" /note="2'-OMe-nucleotide"
  modified_base 10..10: /mod_base="OTHER" /note="2'-fluoro-nucleotide"
  modified_base 11..11: /mod_base="OTHER" /note="2'-OMe-nucleotide"
  modified_base 12..12: /mod_base="OTHER" /note="2'-fluoro-nucleotide"
  modified_base 13..13: /mod_base="OTHER" /note="2'-fluoro-nucleotide"
  modified_base 14..14: /mod_base="OTHER" /note="2'-fluoro-nucleotide"
  modified_base 15..15: /mod_base="OTHER" /note="2'-OMe-nucleotide"
  modified_base 16..16: /mod_base="OTHER" /note="2'-OMe-nucleotide"
  modified_base 17..17: /mod_base="OTHER" /note="2'-OMe-nucleotide"
  modified_base 18..18: /mod_base="OTHER" /note="2'-OMe-nucleotide"
  modified_base 19..19: /mod_base="OTHER" /note="2'-OMe-nucleotide"
  modified_base 20..20: /mod_base="OTHER" /note="2'-OMe-nucleotide"
  modified_base 21..21: /mod_base="OTHER" /note="2'-OMe-nucleotide"
  modified_base 22..22: /mod_base="OTHER" /note="2'-OMe-nucleotide"
  modified_base 23..23: /mod_base="OTHER" /note="Cyclohexane-morpholino-thymidine analog 4"
  modified_base 24..24: /mod_base="OTHER" /note="Cyclohexane-morpholino-thymidine analog 4"
tttguauuaaauccuuaagagatt

SEQ ID NO: 956 - DNA, 24 bp, Artificial Sequence
  Description of Artificial Sequence: Synthetic oligonucleotide
  Description of Combined DNA/RNA Molecule: Synthetic oligonucleotide
  N-term hydroxyl group
  C-term hydroxyl group
  modified_base 1..1: /mod_base="OTHER" /note="GalNAc-morpholino-thymidine analog 7"
  modified_base 2..2: /mod_base="OTHER" /note="GalNAc-morpholino-thymidine analog 7"
  modified_base 3..3: /mod_base="OTHER" /note="GalNAc-morpholino-thymidine analog 7"
  modified_base 4..4: /mod_base="OTHER" /note="2'-OMe-nucleotide"
  modified_base 5..5: /mod_base="OTHER" /note="2'-OMe-nucleotide"
  modified_base 6..6: /mod_base="OTHER" /note="2'-OMe-nucleotide"
  modified_base 7..7: /mod_base="OTHER" /note="2'-OMe-nucleotide"
  modified_base 8..8: /mod_base="OTHER" /note="2'-fluoro-nucleotide"
  modified_base 9..9: /mod_base="OTHER" /note="2'-OMe-nucleotide"
  modified_base 10..10: /mod_base="OTHER" /note="2'-fluoro-nucleotide"
  modified_base 11..11: /mod_base="OTHER" /note="2'-OMe-nucleotide"
  modified_base 12..12: /mod_base="OTHER" /note="2'-fluoro-nucleotide"
  modified_base 13..13: /mod_base="OTHER" /note="2'-fluoro-nucleotide"
  modified_base 14..14: /mod_base="OTHER" /note="2'-fluoro-nucleotide"
  modified_base 15..15: /mod_base="OTHER" /note="2'-OMe-nucleotide"
  modified_base 16..16: /mod_base="OTHER" /note="2'-OMe-nucleotide"
  modified_base 17..17: /mod_base="OTHER" /note="2'-OMe-nucleotide"
  modified_base 18..18: /mod_base="OTHER" /note="2'-OMe-nucleotide"
  modified_base 19..19: /mod_base="OTHER" /note="2'-OMe-nucleotide"
  modified_base 20..20: /mod_base="OTHER" /note="2'-OMe-nucleotide"
  modified_base 21..21: /mod_base="OTHER" /note="2'-OMe-nucleotide"
  modified_base 22..22: /mod_base="OTHER" /note="2'-OMe-nucleotide"
  modified_base 23..23: /mod_base="OTHER" /note="Cyclohexane-morpholino-thymidine analog 4"
  modified_base 24..24: /mod_base="OTHER" /note="Cyclohexane-morpholino-thymidine analog 4"
tttguauuaaauccuuaagagatt

SEQ ID NO: 957 - DNA, 24 bp, Artificial Sequence
  Description of Artificial Sequence: Synthetic oligonucleotide
  Description of Combined DNA/RNA Molecule: Synthetic oligonucleotide
  N-term hydroxyl group
  C-term hydroxyl group
  modified_base 1..1: /mod_base="OTHER" /note="GalNAc-morpholino-thymidine analog 7"
  modified_base 2..2: /mod_base="OTHER" /note="GalNAc-morpholino-thymidine analog 7"
  modified_base 3..3: /mod_base="OTHER" /note="GalNAc-morpholino-thymidine analog 7"
  modified_base 4..4: /mod_base="OTHER" /note="2'-OMe-nucleotide"
  modified_base 5..5: /mod_base="OTHER" /note="2'-OMe-nucleotide"
  modified_base 6..6: /mod_base="OTHER" /note="2'-OMe-nucleotide"
  modified_base 7..7: /mod_base="OTHER" /note="2'-OMe-nucleotide"
  modified_base 8..8: /mod_base="OTHER" /note="2'-fluoro-nucleotide"
  modified_base 9..9: /mod_base="OTHER" /note="2'-OMe-nucleotide"
  modified_base 10..10: /mod_base="OTHER" /note="2'-fluoro-nucleotide"
  modified_base 11..11: /mod_base="OTHER" /note="2'-OMe-nucleotide"
  modified_base 12..12: /mod_base="OTHER" /note="2'-fluoro-nucleotide"
  modified_base 13..13: /mod_base="OTHER" /note="2'-fluoro-nucleotide"
  modified_base 14..14: /mod_base="OTHER" /note="2'-fluoro-nucleotide"
  modified_base 15..15: /mod_base="OTHER" /note="2'-OMe-nucleotide"
  modified_base 16..16: /mod_base="OTHER" /note="2'-OMe-nucleotide"
  modified_base 17..17: /mod_base="OTHER" /note="2'-OMe-nucleotide"
  modified_base 18..18: /mod_base="OTHER" /note="2'-OMe-nucleotide"
  modified_base 19..19: /mod_base="OTHER" /note="2'-OMe-nucleotide"
  modified_base 20..20: /mod_base="OTHER" /note="2'-OMe-nucleotide"
  modified_base 21..21: /mod_base="OTHER" /note="2'-OMe-nucleotide"
  modified_base 22..22: /mod_base="OTHER" /note="2'-OMe-nucleotide"
  modified_base 23..23: /mod_base="OTHER" /note="Cyclohexane-morpholino-thymidine analog 4"
  modified_base 24..24: /mod_base="OTHER" /note="Cyclohexane-morpholino-thymidine analog 4"
tttguauuaaauccuuaagagatt

SEQ ID NO: 958 - DNA, 24 bp, Artificial Sequence
  Description of Artificial Sequence: Synthetic oligonucleotide
  Description of Combined DNA/RNA Molecule: Synthetic oligonucleotide
  N-term hydroxyl group
  C-term hydroxyl group
  modified_base 1..1: /mod_base="OTHER" /note="GalNAc-morpholino-thymidine analog 7"
  modified_base 2..2: /mod_base="OTHER" /note="GalNAc-morpholino-thymidine analog 7"
  modified_base 3..3: /mod_base="OTHER" /note="GalNAc-morpholino-thymidine analog 7"
  modified_base 4..4: /mod_base="OTHER" /note="2'-OMe-nucleotide"
  modified_base 5..5: /mod_base="OTHER" /note="2'-OMe-nucleotide"
  modified_base 6..6: /mod_base="OTHER" /note="2'-OMe-nucleotide"
  modified_base 7..7: /mod_base="OTHER" /note="2'-OMe-nucleotide"
  modified_base 8..8: /mod_base="OTHER" /note="2'-fluoro-nucleotide"
  modified_base 9..9: /mod_base="OTHER" /note="2'-OMe-nucleotide"
  modified_base 10..10: /mod_base="OTHER" /note="2'-fluoro-nucleotide"
  modified_base 11..11: /mod_base="OTHER" /note="2'-OMe-nucleotide"
  modified_base 12..12: /mod_base="OTHER" /note="2'-fluoro-nucleotide"
  modified_base 13..13: /mod_base="OTHER" /note="2'-fluoro-nucleotide"
  modified_base 14..14: /mod_base="OTHER" /note="2'-fluoro-nucleotide"
  modified_base 15..15: /mod_base="OTHER" /note="2'-OMe-nucleotide"
  modified_base 16..16: /mod_base="OTHER" /note="2'-OMe-nucleotide"
  modified_base 17..17: /mod_base="OTHER" /note="2'-OMe-nucleotide"
  modified_base 18..18: /mod_base="OTHER" /note="2'-OMe-nucleotide"
  modified_base 19..19: /mod_base="OTHER" /note="2'-OMe-nucleotide"
  modified_base 20..20: /mod_base="OTHER" /note="2'-OMe-nucleotide"
  modified_base 21..21: /mod_base="OTHER" /note="2'-OMe-nucleotide"
  modified_base 22..22: /mod_base="OTHER" /note="2'-OMe-nucleotide"
  modified_base 23..23: /mod_base="OTHER" /note="Cyclohexane-morpholino-thymidine analog 4"
  modified_base 24..24: /mod_base="OTHER" /note="Cyclohexane-morpholino-thymidine analog 4"
tttguauuaaauccuuaagagatt

SEQ ID NO: 959 - DNA, 24 bp, Artificial Sequence
  Description of Artificial Sequence: Synthetic oligonucleotide
  Description of Combined DNA/RNA Molecule: Synthetic oligonucleotide
  N-term hydroxyl group
  C-term hydroxyl group
  modified_base 1..1: /mod_base="OTHER" /note="GalNAc-morpholino-thymidine analog 7"
  modified_base 2..2: /mod_base="OTHER" /note="GalNAc-morpholino-thymidine analog 7"
  modified_base 3..3: /mod_base="OTHER" /note="GalNAc-morpholino-thymidine analog 7"
  modified_base 4..4: /mod_base="OTHER" /note="2'-OMe-nucleotide"
  modified_base 5..5: /mod_base="OTHER" /note="2'-OMe-nucleotide"
  modified_base 6..6: /mod_base="OTHER" /note="2'-OMe-nucleotide"
  modified_base 7..7: /mod_base="OTHER" /note="2'-OMe-nucleotide"
  modified_base 8..8: /mod_base="OTHER" /note="2'-fluoro-nucleotide"
  modified_base 9..9: /mod_base="OTHER" /note="2'-OMe-nucleotide"
  modified_base 10..10: /mod_base="OTHER" /note="2'-fluoro-nucleotide"
  modified_base 11..11: /mod_base="OTHER" /note="2'-OMe-nucleotide"
  modified_base 12..12: /mod_base="OTHER" /note="2'-fluoro-nucleotide"
  modified_base 13..13: /mod_base="OTHER" /note="2'-fluoro-nucleotide"
  modified_base 14..14: /mod_base="OTHER" /note="2'-fluoro-nucleotide"
  modified_base 15..15: /mod_base="OTHER" /note="2'-OMe-nucleotide"
  modified_base 16..16: /mod_base="OTHER" /note="2'-OMe-nucleotide"
  modified_base 17..17: /mod_base="OTHER" /note="2'-OMe-nucleotide"
  modified_base 18..18: /mod_base="OTHER" /note="2'-OMe-nucleotide"
  modified_base 19..19: /mod_base="OTHER" /note="2'-OMe-nucleotide"
  modified_base 20..20: /mod_base="OTHER" /note="2'-OMe-nucleotide"
  modified_base 21..21: /mod_base="OTHER" /note="2'-OMe-nucleotide"
  modified_base 22..22: /mod_base="OTHER" /note="2'-OMe-nucleotide"
  modified_base 23..23: /mod_base="OTHER" /note="Cyclohexane-morpholino-thymidine analog 4"
  modified_base 24..24: /mod_base="OTHER" /note="Cyclohexane-morpholino-thymidine analog 4"
tttguauuaaauccuuaagagatt

SEQ ID NO: 960 - DNA, 24 bp, Artificial Sequence
  Description of Artificial Sequence: Synthetic oligonucleotide
  Description of Combined DNA/RNA Molecule: Synthetic oligonucleotide
  N-term hydroxyl group
  C-term hydroxyl group
  modified_base 1..1: /mod_base="OTHER" /note="GalNAc-morpholino-thymidine analog 7"
  modified_base 2..2: /mod_base="OTHER" /note="GalNAc-morpholino-thymidine analog 7"
  modified_base 3..3: /mod_base="OTHER" /note="GalNAc-morpholino-thymidine analog 7"
  modified_base 4..4: /mod_base="OTHER" /note="Locked nucleic acid (LNA) nucleotide"
  modified_base 5..5: /mod_base="OTHER" /note="Locked nucleic acid (LNA) nucleotide"
  modified_base 6..6: /mod_base="OTHER" /note="2'-OMe-nucleotide"
  modified_base 7..7: /mod_base="OTHER" /note="2'-OMe-nucleotide"
  modified_base 8..8: /mod_base="OTHER" /note="2'-fluoro-nucleotide"
  modified_base 9..9: /mod_base="OTHER" /note="2'-OMe-nucleotide"
  modified_base 10..10: /mod_base="OTHER" /note="2'-fluoro-nucleotide"
  modified_base 11..11: /mod_base="OTHER" /note="2'-OMe-nucleotide"
  modified_base 12..12: /mod_base="OTHER" /note="2'-fluoro-nucleotide"
  modified_base 13..13: /mod_base="OTHER" /note="2'-fluoro-nucleotide"
  modified_base 14..14: /mod_base="OTHER" /note="2'-fluoro-nucleotide"
  modified_base 15..15: /mod_base="OTHER" /note="2'-OMe-nucleotide"
  modified_base 16..16: /mod_base="OTHER" /note="2'-OMe-nucleotide"
  modified_base 17..17: /mod_base="OTHER" /note="2'-OMe-nucleotide"
  modified_base 18..18: /mod_base="OTHER" /note="2'-OMe-nucleotide"
  modified_base 19..19: /mod_base="OTHER" /note="2'-OMe-nucleotide"
  modified_base 20..20: /mod_base="OTHER" /note="2'-OMe-nucleotide"
  modified_base 21..21: /mod_base="OTHER" /note="2'-OMe-nucleotide"
  modified_base 22..22: /mod_base="OTHER" /note="2'-OMe-nucleotide"
  modified_base 23..23: /mod_base="OTHER" /note="Cyclohexane-morpholino-thymidine analog 4"
  modified_base 24..24: /mod_base="OTHER" /note="Cyclohexane-morpholino-thymidine analog 4"
tttguauuaaauccuuaagagatt

SEQ ID NO: 961 - DNA, 24 bp, Artificial Sequence
  Description of Artificial Sequence: Synthetic oligonucleotide
  Description of Combined DNA/RNA Molecule: Synthetic oligonucleotide
  N-term hydroxyl group
  C-term hydroxyl group
  modified_base 1..1: /mod_base="OTHER" /note="GalNAc-morpholino-thymidine analog 7"
  modified_base 2..2: /mod_base="OTHER" /note="GalNAc-morpholino-thymidine analog 7"
  modified_base 3..3: /mod_base="OTHER" /note="GalNAc-morpholino-thymidine analog 7"
  modified_base 4..4: /mod_base="OTHER" /note="Locked nucleic acid (LNA) nucleotide"
  modified_base 5..5: /mod_base="OTHER" /note="Locked nucleic acid (LNA) nucleotide"
  modified_base 6..6: /mod_base="OTHER" /note="2'-OMe-nucleotide"
  modified_base 7..7: /mod_base="OTHER" /note="2'-OMe-nucleotide"
  modified_base 8..8: /mod_base="OTHER" /note="2'-fluoro-nucleotide"
  modified_base 9..9: /mod_base="OTHER" /note="2'-OMe-nucleotide"
  modified_base 10..10: /mod_base="OTHER" /note="2'-fluoro-nucleotide"
  modified_base 11..11: /mod_base="OTHER" /note="2'-OMe-nucleotide"
  modified_base 12..12: /mod_base="OTHER" /note="2'-fluoro-nucleotide"
  modified_base 13..13: /mod_base="OTHER" /note="2'-fluoro-nucleotide"
  modified_base 14..14: /mod_base="OTHER" /note="2'-fluoro-nucleotide"
  modified_base 15..15: /mod_base="OTHER" /note="2'-OMe-nucleotide"
  modified_base 16..16: /mod_base="OTHER" /note="2'-OMe-nucleotide"
  modified_base 17..17: /mod_base="OTHER" /note="2'-OMe-nucleotide"
  modified_base 18..18: /mod_base="OTHER" /note="2'-OMe-nucleotide"
  modified_base 19..19: /mod_base="OTHER" /note="2'-OMe-nucleotide"
  modified_base 20..20: /mod_base="OTHER" /note="2'-OMe-nucleotide"
  modified_base 21..21: /mod_base="OTHER" /note="2'-OMe-nucleotide"
  modified_base 22..22: /mod_base="OTHER" /note="2'-OMe-nucleotide"
  modified_base 23..23: /mod_base="OTHER" /note="Cyclohexane-morpholino-thymidine analog 4"
  modified_base 24..24: /mod_base="OTHER" /note="Cyclohexane-morpholino-thymidine analog 4"
tttguauuaaauccuuaagagatt

SEQ ID NO: 962 - DNA, 24 bp, Artificial Sequence
  Description of Artificial Sequence: Synthetic oligonucleotide
  Description of Combined DNA/RNA Molecule: Synthetic oligonucleotide
  N-term hydroxyl group
  C-term hydroxyl group
  modified_base 1..1: /mod_base="OTHER" /note="GalNAc-morpholino-thymidine analog 7"
  modified_base 2..2: /mod_base="OTHER" /note="GalNAc-morpholino-thymidine analog 7"
  modified_base 3..3: /mod_base="OTHER" /note="GalNAc-morpholino-thymidine analog 7"
  modified_base 4..4: /mod_base="OTHER" /note="Locked nucleic acid (LNA) nucleotide"
  modified_base 5..5: /mod_base="OTHER" /note="Locked nucleic acid (LNA) nucleotide"
  modified_base 6..6: /mod_base="OTHER" /note="2'-OMe-nucleotide"
  modified_base 7..7: /mod_base="OTHER" /note="2'-OMe-nucleotide"
  modified_base 8..8: /mod_base="OTHER" /note="2'-fluoro-nucleotide"
  modified_base 9..9: /mod_base="OTHER" /note="2'-OMe-nucleotide"
  modified_base 10..10: /mod_base="OTHER" /note="2'-fluoro-nucleotide"
  modified_base 11..11: /mod_base="OTHER" /note="2'-OMe-nucleotide"
  modified_base 12..12: /mod_base="OTHER" /note="2'-fluoro-nucleotide"
  modified_base 13..13: /mod_base="OTHER" /note="2'-fluoro-nucleotide"
  modified_base 14..14: /mod_base="OTHER" /note="2'-fluoro-nucleotide"
  modified_base 15..15: /mod_base="OTHER" /note="2'-OMe-nucleotide"
  modified_base 16..16: /mod_base="OTHER" /note="2'-OMe-nucleotide"
  modified_base 17..17: /mod_base="OTHER" /note="2'-OMe-nucleotide"
  modified_base 18..18: /mod_base="OTHER" /note="2'-OMe-nucleotide"
  modified_base 19..19: /mod_base="OTHER" /note="2'-OMe-nucleotide"
  modified_base 20..20: /mod_base="OTHER" /note="2'-OMe-nucleotide"
  modified_base 21..21: /mod_base="OTHER" /note="2'-OMe-nucleotide"
  modified_base 22..22: /mod_base="OTHER" /note="2'-OMe-nucleotide"
  modified_base 23..23: /mod_base="OTHER" /note="Cyclohexane-morpholino-thymidine analog 4"
  modified_base 24..24: /mod_base="OTHER" /note="Cyclohexane-morpholino-thymidine analog 4"
tttguauuaaauccuuaagagatt

SEQ ID NO: 963 - DNA, 24 bp, Artificial Sequence
  Description of Artificial Sequence: Synthetic oligonucleotide
  Description of Combined DNA/RNA Molecule: Synthetic oligonucleotide
  N-term hydroxyl group
  C-term hydroxyl group
  modified_base 1..1: /mod_base="OTHER" /note="GalNAc-morpholino-thymidine analog 7"
  modified_base 2..2: /mod_base="OTHER" /note="GalNAc-morpholino-thymidine analog 7"
  modified_base 3..3: /mod_base="OTHER" /note="GalNAc-morpholino-thymidine analog 7"
  modified_base 4..4: /mod_base="OTHER" /note="Locked nucleic acid (LNA) nucleotide"
  modified_base 5..5: /mod_base="OTHER" /note="Locked nucleic acid (LNA) nucleotide"
  modified_base 6..6: /mod_base="OTHER" /note="2'-OMe-nucleotide"
  modified_base 7..7: /mod_base="OTHER" /note="2'-OMe-nucleotide"
  modified_base 8..8: /mod_base="OTHER" /note="2'-fluoro-nucleotide"
  modified_base 9..9: /mod_base="OTHER" /note="2'-OMe-nucleotide"
  modified_base 10..10: /mod_base="OTHER" /note="2'-fluoro-nucleotide"
  modified_base 11..11: /mod_base="OTHER" /note="2'-OMe-nucleotide"
  modified_base 12..12: /mod_base="OTHER" /note="2'-fluoro-nucleotide"
  modified_base 13..13: /mod_base="OTHER" /note="2'-fluoro-nucleotide"
  modified_base 14..14: /mod_base="OTHER" /note="2'-fluoro-nucleotide"
  modified_base 15..15: /mod_base="OTHER" /note="2'-OMe-nucleotide"
  modified_base 16..16: /mod_base="OTHER" /note="2'-OMe-nucleotide"
  modified_base 17..17: /mod_base="OTHER" /note="2'-OMe-nucleotide"
  modified_base 18..18: /mod_base="OTHER" /note="2'-OMe-nucleotide"
  modified_base 19..19: /mod_base="OTHER" /note="2'-OMe-nucleotide"
  modified_base 20..20: /mod_base="OTHER" /note="2'-OMe-nucleotide"
  modified_base 21..21: /mod_base="OTHER" /note="2'-OMe-nucleotide"
  modified_base 22..22: /mod_base="OTHER" /note="2'-OMe-nucleotide"
  modified_base 23..23: /mod_base="OTHER" /note="Cyclohexane-morpholino-thymidine analog 4"
  modified_base 24..24: /mod_base="OTHER" /note="Cyclohexane-morpholino-thymidine analog 4"
tttguauuaaauccuuaagagatt

SEQ ID NO: 964 - DNA, 24 bp, Artificial Sequence
  Description of Artificial Sequence: Synthetic oligonucleotide
  Description of Combined DNA/RNA Molecule: Synthetic oligonucleotide
  N-term hydroxyl group
  C-term hydroxyl group
  modified_base 1..1: /mod_base="OTHER" /note="GalNAc-morpholino-thymidine analog 7"
  modified_base 2..2: /mod_base="OTHER" /note="GalNAc-morpholino-thymidine analog 7"
  modified_base 3..3: /mod_base="OTHER" /note="GalNAc-morpholino-thymidine analog 7"
  modified_base 4..4: /mod_base="OTHER" /note="Locked nucleic acid (LNA) nucleotide"
  modified_base 5..5: /mod_base="OTHER" /note="Locked nucleic acid (LNA) nucleotide"
  modified_base 6..6: /mod_base="OTHER" /note="2'-OMe-nucleotide"
  modified_base 7..7: /mod_base="OTHER" /note="2'-OMe-nucleotide"
  modified_base 8..8: /mod_base="OTHER" /note="2'-fluoro-nucleotide"
  modified_base 9..9: /mod_base="OTHER" /note="2'-OMe-nucleotide"
  modified_base 10..10: /mod_base="OTHER" /note="2'-fluoro-nucleotide"
  modified_base 11..11: /mod_base="OTHER" /note="2'-OMe-nucleotide"
  modified_base 12..12: /mod_base="OTHER" /note="2'-fluoro-nucleotide"
  modified_base 13..13: /mod_base="OTHER" /note="2'-fluoro-nucleotide"
  modified_base 14..14: /mod_base="OTHER" /note="2'-fluoro-nucleotide"
  modified_base 15..15: /mod_base="OTHER" /note="2'-OMe-nucleotide"
  modified_base 16..16: /mod_base="OTHER" /note="2'-OMe-nucleotide"
  modified_base 17..17: /mod_base="OTHER" /note="2'-OMe-nucleotide"
  modified_base 18..18: /mod_base="OTHER" /note="2'-OMe-nucleotide"
  modified_base 19..19: /mod_base="OTHER" /note="2'-OMe-nucleotide"
  modified_base 20..20: /mod_base="OTHER" /note="2'-OMe-nucleotide"
  modified_base 21..21: /mod_base="OTHER" /note="2'-OMe-nucleotide"
  modified_base 22..22: /mod_base="OTHER" /note="2'-OMe-nucleotide"
  modified_base 23..23: /mod_base="OTHER" /note="Cyclohexane-morpholino-thymidine analog 4"
  modified_base 24..24: /mod_base="OTHER" /note="Cyclohexane-morpholino-thymidine analog 4"
tttguauuaaauccuuaagagatt

SEQ ID NO: 965 - DNA, 22 bp, Artificial Sequence
  Description of Artificial Sequence: Synthetic oligonucleotide
  Description of Combined DNA/RNA Molecule: Synthetic oligonucleotide
  N-term hydroxyl group
  C-term hydroxyl group
  modified_base 1..1: /mod_base="OTHER" /note="GalNAc-morpholino-thymidine analog 7"
  modified_base 2..2: /mod_base="OTHER" /note="GalNAc-morpholino-thymidine analog 7"
  modified_base 3..3: /mod_base="OTHER" /note="GalNAc-morpholino-thymidine analog 7"
  modified_base 4..4: /mod_base="OTHER" /note="2'-OMe-nucleotide"
  modified_base 5..5: /mod_base="OTHER" /note="2'-OMe-nucleotide"
  modified_base 6..6: /mod_base="OTHER" /note="2'-OMe-nucleotide"
  modified_base 7..7: /mod_base="OTHER" /note="2'-OMe-nucleotide"
  modified_base 8..8: /mod_base="OTHER" /note="2'-fluoro-nucleotide"
  modified_base 9..9: /mod_base="OTHER" /note="2'-OMe-nucleotide"
  modified_base 10..10: /mod_base="OTHER" /note="2'-fluoro-nucleotide"
  modified_base 11..11: /mod_base="OTHER" /note="2'-fluoro-nucleotide"
  modified_base 12..12: /mod_base="OTHER" /note="2'-fluoro-nucleotide"
  modified_base 13..13: /mod_base="OTHER" /note="2'-OMe-nucleotide"
  modified_base 14..14: /mod_base="OTHER" /note="2'-OMe-nucleotide"
  modified_base 15..15: /mod_base="OTHER" /note="2'-OMe-nucleotide"
  modified_base 16..16: /mod_base="OTHER" /note="2'-OMe-nucleotide"
  modified_base 17..17: /mod_base="OTHER" /note="2'-OMe-nucleotide"
  modified_base 18..18: /mod_base="OTHER" /note="2'-OMe-nucleotide"
  modified_base 19..19: /mod_base="OTHER" /note="2'-OMe-nucleotide"
  modified_base 20..20: /mod_base="OTHER" /note="2'-OMe-nucleotide"
  misc_feature 20..21: /note="phosphorothioate bond"
  modified_base 21..21: /mod_base="OTHER" /note="2'-OMe-nucleotide"
  misc_feature 21..22: /note="phosphorothioate bond"
  modified_base 22..22: /mod_base="OTHER" /note="2'-OMe-nucleotide"
tttauugaucaagacaauucau

SEQ ID NO: 966 - DNA, 22 bp, Artificial Sequence
  Description of Artificial Sequence: Synthetic oligonucleotide
  Description of Combined DNA/RNA Molecule: Synthetic oligonucleotide
  N-term hydroxyl group
  C-term hydroxyl group
  modified_base 1..1: /mod_base="OTHER" /note="GalNAc-morpholino-thymidine analog 7"
  modified_base 2..2: /mod_base="OTHER" /note="GalNAc-morpholino-thymidine analog 7"
  modified_base 3..3: /mod_base="OTHER" /note="GalNAc-morpholino-thymidine analog 7"
  modified_base 4..4: /mod_base="OTHER" /note="2'-OMe-nucleotide"
  modified_base 5..5: /mod_base="OTHER" /note="2'-OMe-nucleotide"
  modified_base 6..6: /mod_base="OTHER" /note="2'-OMe-nucleotide"
  modified_base 7..7: /mod_base="OTHER" /note="2'-OMe-nucleotide"
  modified_base 8..8: /mod_base="OTHER" /note="2'-fluoro-nucleotide"
  modified_base 9..9: /mod_base="OTHER" /note="2'-OMe-nucleotide"
  modified_base 10..10: /mod_base="OTHER" /note="2'-fluoro-nucleotide"
  modified_base 11..11: /mod_base="OTHER" /note="2'-fluoro-nucleotide"
  modified_base 12..12: /mod_base="OTHER" /note="2'-fluoro-nucleotide"
  modified_base 13..13: /mod_base="OTHER" /note="2'-OMe-nucleotide"
  modified_base 14..14: /mod_base="OTHER" /note="2'-OMe-nucleotide"
  modified_base 15..15: /mod_base="OTHER" /note="2'-OMe-nucleotide"
  modified_base 16..16: /mod_base="OTHER" /note="2'-OMe-nucleotide"
  modified_base 17..17: /mod_base="OTHER" /note="2'-OMe-nucleotide"
  modified_base 18..18: /mod_base="OTHER" /note="2'-OMe-nucleotide"
  modified_base 19..19: /mod_base="OTHER" /note="2'-OMe-nucleotide"
  modified_base 20..20: /mod_base="OTHER" /note="2'-OMe-nucleotide"
  misc_feature 20..21: /note="phosphorothioate bond"
  modified_base 21..21: /mod_base="OTHER" /note="2'-OMe-nucleotide"
  misc_feature 21..22: /note="phosphorothioate bond"
  modified_base 22..22: /mod_base="OTHER" /note="2'-OMe-nucleotide"
tttauugaucaagacaauucau

SEQ ID NO: 967 - DNA, 22 bp, Artificial Sequence
  Description of Artificial Sequence: Synthetic oligonucleotide
  Description of Combined DNA/RNA Molecule: Synthetic oligonucleotide
  N-term hydroxyl group
  C-term hydroxyl group
  modified_base 1..1: /mod_base="OTHER" /note="GalNAc-morpholino-thymidine analog 7"
  modified_base 2..2: /mod_base="OTHER" /note="GalNAc-morpholino-thymidine analog 7"
  modified_base 3..3: /mod_base="OTHER" /note="GalNAc-morpholino-thymidine analog 7"
  modified_base 4..4: /mod_base="OTHER" /note="2'-OMe-nucleotide"
  modified_base 5..5: /mod_base="OTHER" /note="2'-OMe-nucleotide"
  modified_base 6..6: /mod_base="OTHER" /note="2'-OMe-nucleotide"
  modified_base 7..7: /mod_base="OTHER" /note="2'-OMe-nucleotide"
  modified_base 8..8: /mod_base="OTHER" /note="2'-fluoro-nucleotide"
  modified_base 9..9: /mod_base="OTHER" /note="2'-OMe-nucleotide"
  modified_base 10..10: /mod_base="OTHER" /note="2'-fluoro-nucleotide"
  modified_base 11..11: /mod_base="OTHER" /note="2'-fluoro-nucleotide"
  modified_base 12..12: /mod_base="OTHER" /note="2'-fluoro-nucleotide"
  modified_base 13..13: /mod_base="OTHER" /note="2'-OMe-nucleotide"
  modified_base 14..14: /mod_base="OTHER" /note="2'-OMe-nucleotide"
  modified_base 15..15: /mod_base="OTHER" /note="2'-OMe-nucleotide"
  modified_base 16..16: /mod_base="OTHER" /note="2'-OMe-nucleotide"
  modified_base 17..17: /mod_base="OTHER" /note="2'-OMe-nucleotide"
  modified_base 18..18: /mod_base="OTHER" /note="2'-OMe-nucleotide"
  modified_base 19..19: /mod_base="OTHER" /note="2'-OMe-nucleotide"
  modified_base 20..20: /mod_base="OTHER" /note="2'-OMe-nucleotide"
  misc_feature 20..21: /note="phosphorothioate bond"
  modified_base 21..21: /mod_base="OTHER" /note="2'-OMe-nucleotide"
  misc_feature 21..22: /note="phosphorothioate bond"
  modified_base 22..22: /mod_base="OTHER" /note="2'-OMe-nucleotide"
tttauugaucaagacaauucau

SEQ ID NO: 968 - DNA, 22 bp, Artificial Sequence
  Description of Artificial Sequence: Synthetic oligonucleotide
  Description of Combined DNA/RNA Molecule: Synthetic oligonucleotide
  N-term hydroxyl group
  C-term hydroxyl group
  modified_base 1..1: /mod_base="OTHER" /note="GalNAc-morpholino-thymidine analog 7"
  modified_base 2..2: /mod_base="OTHER" /note="GalNAc-morpholino-thymidine analog 7"
  modified_base 3..3: /mod_base="OTHER" /note="GalNAc-morpholino-thymidine analog 7"
  modified_base 4..4: /mod_base="OTHER" /note="2'-OMe-nucleotide"
  modified_base 5..5: /mod_base="OTHER" /note="2'-OMe-nucleotide"
  modified_base 6..6: /mod_base="OTHER" /note="2'-OMe-nucleotide"
  modified_base 7..7: /mod_base="OTHER" /note="2'-OMe-nucleotide"
  modified_base 8..8: /mod_base="OTHER" /note="2'-fluoro-nucleotide"
  modified_base 9..9: /mod_base="OTHER" /note="2'-OMe-nucleotide"
  modified_base 10..10: /mod_base="OTHER" /note="2'-fluoro-nucleotide"
  modified_base 11..11: /mod_base="OTHER" /note="2'-fluoro-nucleotide"
  modified_base 12..12: /mod_base="OTHER" /note="2'-fluoro-nucleotide"
  modified_base 13..13: /mod_base="OTHER" /note="2'-OMe-nucleotide"
  modified_base 14..14: /mod_base="OTHER" /note="2'-OMe-nucleotide"
  modified_base 15..15: /mod_base="OTHER" /note="2'-OMe-nucleotide"
  modified_base 16..16: /mod_base="OTHER" /note="2'-OMe-nucleotide"
  modified_base 17..17: /mod_base="OTHER" /note="2'-OMe-nucleotide"
  modified_base 18..18: /mod_base="OTHER" /note="2'-OMe-nucleotide"
  modified_base 19..19: /mod_base="OTHER" /note="2'-OMe-nucleotide"
  modified_base 20..20: /mod_base="OTHER" /note="2'-OMe-nucleotide"
  misc_feature 20..21: /note="phosphorothioate bond"
  modified_base 21..21: /mod_base="OTHER" /note="2'-OMe-nucleotide"
  misc_feature 21..22: /note="phosphorothioate bond"
  modified_base 22..22: /mod_base="OTHER" /note="2'-OMe-nucleotide"
tttauugaucaagacaauucau

SEQ ID NO: 969 - DNA, 22 bp, Artificial Sequence
  Description of Artificial Sequence: Synthetic oligonucleotide
  Description of Combined DNA/RNA Molecule: Synthetic oligonucleotide
  N-term hydroxyl group
  C-term hydroxyl group
  modified_base 1..1: /mod_base="OTHER" /note="GalNAc-morpholino-thymidine analog 7"
  modified_base 2..2: /mod_base="OTHER" /note="GalNAc-morpholino-thymidine analog 7"
  modified_base 3..3: /mod_base="OTHER" /note="GalNAc-morpholino-thymidine analog 7"
  modified_base 4..4: /mod_base="OTHER" /note="Locked nucleic acid (LNA) nucleotide"
  modified_base 5..5: /mod_base="OTHER" /note="Locked nucleic acid (LNA) nucleotide"
  modified_base 6..6: /mod_base="OTHER" /note="2'-OMe-nucleotide"
  modified_base 7..7: /mod_base="OTHER" /note="2'-OMe-nucleotide"
  modified_base 8..8: /mod_base="OTHER" /note="2'-fluoro-nucleotide"
  modified_base 9..9: /mod_base="OTHER" /note="2'-OMe-nucleotide"
  modified_base 10..10: /mod_base="OTHER" /note="2'-fluoro-nucleotide"
  modified_base 11..11: /mod_base="OTHER" /note="2'-fluoro-nucleotide"
  modified_base 12..12: /mod_base="OTHER" /note="2'-fluoro-nucleotide"
  modified_base 13..13: /mod_base="OTHER" /note="2'-OMe-nucleotide"
  modified_base 14..14: /mod_base="OTHER" /note="2'-OMe-nucleotide"
  modified_base 15..15: /mod_base="OTHER" /note="2'-OMe-nucleotide"
  modified_base 16..16: /mod_base="OTHER" /note="2'-OMe-nucleotide"
  modified_base 17..17: /mod_base="OTHER" /note="2'-OMe-nucleotide"
  modified_base 18..18: /mod_base="OTHER" /note="2'-OMe-nucleotide"
  modified_base 19..19: /mod_base="OTHER" /note="2'-OMe-nucleotide"
  modified_base 20..20: /mod_base="OTHER" /note="2'-OMe-nucleotide"
  misc_feature 20..21: /note="phosphorothioate bond"
  modified_base 21..21: /mod_base="OTHER" /note="2'-OMe-nucleotide"
  misc_feature 21..22: /note="phosphorothioate bond"
  modified_base 22..22: /mod_base="OTHER" /note="2'-OMe-nucleotide"
tttauugaucaagacaauucau

SEQ ID NO: 970 - DNA, 22 bp, Artificial Sequence
  Description of Artificial Sequence: Synthetic oligonucleotide
  Description of Combined DNA/RNA Molecule: Synthetic oligonucleotide
  N-term hydroxyl group
  C-term hydroxyl group
  modified_base 1..1: /mod_base="OTHER" /note="GalNAc-morpholino-thymidine analog 7"
  modified_base 2..2: /mod_base="OTHER" /note="GalNAc-morpholino-thymidine analog 7"
  modified_base 3..3: /mod_base="OTHER" /note="GalNAc-morpholino-thymidine analog 7"
  modified_base 4..4: /mod_base="OTHER" /note="Locked nucleic acid (LNA) nucleotide"
  modified_base 5..5: /mod_base="OTHER" /note="Locked nucleic acid (LNA) nucleotide"
  modified_base 6..6: /mod_base="OTHER" /note="2'-OMe-nucleotide"
  modified_base 7..7: /mod_base="OTHER" /note="2'-OMe-nucleotide"
  modified_base 8..8: /mod_base="OTHER" /note="2'-fluoro-nucleotide"
  modified_base 9..9: /mod_base="OTHER" /note="2'-OMe-nucleotide"
  modified_base 10..10: /mod_base="OTHER" /note="2'-fluoro-nucleotide"
  modified_base 11..11: /mod_base="OTHER" /note="2'-fluoro-nucleotide"
  modified_base 12..12: /mod_base="OTHER" /note="2'-fluoro-nucleotide"
  modified_base 13..13: /mod_base="OTHER" /note="2'-OMe-nucleotide"
  modified_base 14..14: /mod_base="OTHER" /note="2'-OMe-nucleotide"
  modified_base 15..15: /mod_base="OTHER" /note="2'-OMe-nucleotide"
  modified_base 16..16: /mod_base="OTHER" /note="2'-OMe-nucleotide"
  modified_base 17..17: /mod_base="OTHER" /note="2'-OMe-nucleotide"
  modified_base 18..18: /mod_base="OTHER" /note="2'-OMe-nucleotide"
  modified_base 19..19: /mod_base="OTHER" /note="2'-OMe-nucleotide"
  modified_base 20..20: /mod_base="OTHER" /note="2'-OMe-nucleotide"
  misc_feature 20..21: /note="phosphorothioate bond"
  modified_base 21..21: /mod_base="OTHER" /note="2'-OMe-nucleotide"
  misc_feature 21..22: /note="phosphorothioate bond"
  modified_base 22..22: /mod_base="OTHER" /note="2'-OMe-nucleotide"
tttauugaucaagacaauucau

SEQ ID NO: 971 - DNA, 22 bp, Artificial Sequence
  Description of Artificial Sequence: Synthetic oligonucleotide
  Description of Combined DNA/RNA Molecule: Synthetic oligonucleotide
  N-term hydroxyl group
  C-term hydroxyl group
  modified_base 1..1: /mod_base="OTHER" /note="GalNAc-morpholino-thymidine analog 7"
  modified_base 2..2: /mod_base="OTHER" /note="GalNAc-morpholino-thymidine analog 7"
  modified_base 3..3: /mod_base="OTHER" /note="GalNAc-morpholino-thymidine analog 7"
  modified_base 4..4: /mod_base="OTHER" /note="Locked nucleic acid (LNA) nucleotide"
  modified_base 5..5: /mod_base="OTHER" /note="Locked nucleic acid (LNA) nucleotide"
  modified_base 6..6: /mod_base="OTHER" /note="2'-OMe-nucleotide"
  modified_base 7..7: /mod_base="OTHER" /note="2'-OMe-nucleotide"
  modified_base 8..8: /mod_base="OTHER" /note="2'-fluoro-nucleotide"
  modified_base 9..9: /mod_base="OTHER" /note="2'-OMe-nucleotide"
  modified_base 10..10: /mod_base="OTHER" /note="2'-fluoro-nucleotide"
  modified_base 11..11: /mod_base="OTHER" /note="2'-fluoro-nucleotide"
  modified_base 12..12: /mod_base="OTHER" /note="2'-fluoro-nucleotide"
  modified_base 13..13: /mod_base="OTHER" /note="2'-OMe-nucleotide"
  modified_base 14..14: /mod_base="OTHER" /note="2'-OMe-nucleotide"
  modified_base 15..15: /mod_base="OTHER" /note="2'-OMe-nucleotide"
  modified_base 16..16: /mod_base="OTHER" /note="2'-OMe-nucleotide"
  modified_base 17..17: /mod_base="OTHER" /note="2'-OMe-nucleotide"
  modified_base 18..18: /mod_base="OTHER" /note="2'-OMe-nucleotide"
  modified_base 19..19: /mod_base="OTHER" /note="2'-OMe-nucleotide"
  modified_base 20..20: /mod_base="OTHER" /note="2'-OMe-nucleotide"
  misc_feature 20..21: /note="phosphorothioate bond"
  modified_base 21..21: /mod_base="OTHER" /note="2'-OMe-nucleotide"
  misc_feature 21..22: /note="phosphorothioate bond"
  modified_base 22..22: /mod_base="OTHER" /note="2'-OMe-nucleotide"
tttauugaucaagacaauucau

SEQ ID NO: 972 - DNA, 22 bp, Artificial Sequence
  Description of Artificial Sequence: Synthetic oligonucleotide
  Description of Combined DNA/RNA Molecule: Synthetic oligonucleotide
  N-term hydroxyl group
  C-term hydroxyl group
  modified_base 1..1: /mod_base="OTHER" /note="GalNAc-morpholino-thymidine analog 7"
  modified_base 2..2: /mod_base="OTHER" /note="GalNAc-morpholino-thymidine analog 7"
  modified_base 3..3: /mod_base="OTHER" /note="GalNAc-morpholino-thymidine analog 7"
  modified_base 4..4: /mod_base="OTHER" /note="Locked nucleic acid (LNA) nucleotide"
  modified_base 5..5: /mod_base="OTHER" /note="Locked nucleic acid (LNA) nucleotide"
  modified_base 6..6: /mod_base="OTHER" /note="2'-OMe-nucleotide"
  modified_base 7..7: /mod_base="OTHER" /note="2'-OMe-nucleotide"
  modified_base 8..8: /mod_base="OTHER" /note="2'-fluoro-nucleotide"
  modified_base 9..9: /mod_base="OTHER" /note="2'-OMe-nucleotide"
  modified_base 10..10: /mod_base="OTHER" /note="2'-fluoro-nucleotide"
  modified_base 11..11: /mod_base="OTHER" /note="2'-fluoro-nucleotide"
  modified_base 12..12: /mod_base="OTHER" /note="2'-fluoro-nucleotide"
  modified_base 13..13: /mod_base="OTHER" /note="2'-OMe-nucleotide"
  modified_base 14..14: /mod_base="OTHER" /note="2'-OMe-nucleotide"
  modified_base 15..15: /mod_base="OTHER" /note="2'-OMe-nucleotide"
  modified_base 16..16: /mod_base="OTHER" /note="2'-OMe-nucleotide"
  modified_base 17..17: /mod_base="OTHER" /note="2'-OMe-nucleotide"
  modified_base 18..18: /mod_base="OTHER" /note="2'-OMe-nucleotide"
  modified_base 19..19: /mod_base="OTHER" /note="2'-OMe-nucleotide"
  modified_base 20..20: /mod_base="OTHER" /note="2'-OMe-nucleotide"
  misc_feature 20..21: /note="phosphorothioate bond"
  modified_base 21..21: /mod_base="OTHER" /note="2'-OMe-nucleotide"
  misc_feature 21..22: /note="phosphorothioate bond"
  modified_base 22..22: /mod_base="OTHER" /note="2'-OMe-nucleotide"
tttauugaucaagacaauucau

SEQ ID NO: 973 - DNA, 22 bp, Artificial Sequence
  Description of Artificial Sequence: Synthetic oligonucleotide
  Description of Combined DNA/RNA Molecule: Synthetic oligonucleotide
  N-term hydroxyl group
  C-term hydroxyl group
  modified_base 1..1: /mod_base="OTHER" /note="GalNAc-morpholino-thymidine analog 7"
  modified_base 2..2: /mod_base="OTHER" /note="GalNAc-morpholino-thymidine analog 7"
  modified_base 3..3: /mod_base="OTHER" /note="GalNAc-morpholino-thymidine analog 7"
  modified_base 4..4: /mod_base="OTHER" /note="2'-OMe-nucleotide"
  modified_base 5..5: /mod_base="OTHER" /note="2'-OMe-nucleotide"
  modified_base 6..6: /mod_base="OTHER" /note="2'-OMe-nucleotide"
  modified_base 7..7: /mod_base="OTHER" /note="2'-OMe-nucleotide"
  modified_base 8..8: /mod_base="OTHER" /note="2'-fluoro-nucleotide"
  modified_base 9..9: /mod_base="OTHER" /note="2'-OMe-nucleotide"
  modified_base 10..10: /mod_base="OTHER" /note="2'-fluoro-nucleotide"
  modified_base 11..11: /mod_base="OTHER" /note="2'-OMe-nucleotide"
  modified_base 12..12: /mod_base="OTHER" /note="2'-fluoro-nucleotide"
  modified_base 13..13: /mod_base="OTHER" /note="2'-fluoro-nucleotide"
  modified_base 14..14: /mod_base="OTHER" /note="2'-fluoro-nucleotide"
  modified_base 15..15: /mod_base="OTHER" /note="2'-OMe-nucleotide"
  modified_base 16..16: /mod_base="OTHER" /note="2'-OMe-nucleotide"
  modified_base 17..17: /mod_base="OTHER" /note="2'-OMe-nucleotide"
  modified_base 18..18: /mod_base="OTHER" /note="2'-OMe-nucleotide"
  modified_base 19..19: /mod_base="OTHER" /note="2'-OMe-nucleotide"
  modified_base 20..20: /mod_base="OTHER" /note="2'-OMe-nucleotide"
  misc_feature 20..21: /note="phosphorothioate bond"
  modified_base 21..21: /mod_base="OTHER" /note="2'-OMe-nucleotide"
  misc_feature 21..22: /note="phosphorothioate bond"
  modified_base 22..22: /mod_base="OTHER" /note="2'-OMe-nucleotide"
tttauugaucaagacaauucau

SEQ ID NO: 974 - DNA, 22 bp, Artificial Sequence
  Description of Artificial Sequence: Synthetic oligonucleotide
  Description of Combined DNA/RNA Molecule: Synthetic oligonucleotide
  N-term hydroxyl group
  C-term hydroxyl group
  modified_base 1..1: /mod_base="OTHER" /note="GalNAc-morpholino-thymidine analog 7"
  modified_base 2..2: /mod_base="OTHER" /note="GalNAc-morpholino-thymidine analog 7"
  modified_base 3..3: /mod_base="OTHER" /note="GalNAc-morpholino-thymidine analog 7"
  modified_base 4..4: /mod_base="OTHER" /note="2'-OMe-nucleotide"
  modified_base 5..5: /mod_base="OTHER" /note="2'-OMe-nucleotide"
  modified_base 6..6: /mod_base="OTHER" /note="2'-OMe-nucleotide"
  modified_base 7..7: /mod_base="OTHER" /note="2'-OMe-nucleotide"
  modified_base 8..8: /mod_base="OTHER" /note="2'-fluoro-nucleotide"
  modified_base 9..9: /mod_base="OTHER" /note="2'-OMe-nucleotide"
  modified_base 10..10: /mod_base="OTHER" /note="2'-fluoro-nucleotide"
  modified_base 11..11: /mod_base="OTHER" /note="2'-OMe-nucleotide"
  modified_base 12..12: /mod_base="OTHER" /note="2'-fluoro-nucleotide"
  modified_base 13..13: /mod_base="OTHER" /note="2'-fluoro-nucleotide"
  modified_base 14..14: /mod_base="OTHER" /note="2'-fluoro-nucleotide"
  modified_base 15..15: /mod_base="OTHER" /note="2'-OMe-nucleotide"
  modified_base 16..16: /mod_base="OTHER" /note="2'-OMe-nucleotide"
  modified_base 17..17: /mod_base="OTHER" /note="2'-OMe-nucleotide"
  modified_base 18..18: /mod_base="OTHER" /note="2'-OMe-nucleotide"
  modified_base 19..19: /mod_base="OTHER" /note="2'-OMe-nucleotide"
  modified_base 20..20: /mod_base="OTHER" /note="2'-OMe-nucleotide"
  misc_feature 20..21: /note="phosphorothioate bond"
  modified_base 21..21: /mod_base="OTHER" /note="2'-OMe-nucleotide"
  misc_feature 21..22: /note="phosphorothioate bond"
  modified_base 22..22: /mod_base="OTHER" /note="2'-OMe-nucleotide"
tttauugaucaagacaauucau

SEQ ID NO: 975 - DNA, 22 bp, Artificial Sequence
  Description of Artificial Sequence: Synthetic oligonucleotide
  Description of Combined DNA/RNA Molecule: Synthetic oligonucleotide
  N-term hydroxyl group
  C-term hydroxyl group
  modified_base 1..1: /mod_base="OTHER" /note="GalNAc-morpholino-thymidine analog 7"
  modified_base 2..2: /mod_base="OTHER" /note="GalNAc-morpholino-thymidine analog 7"
  modified_base 3..3: /mod_base="OTHER" /note="GalNAc-morpholino-thymidine analog 7"
  modified_base 4..4: /mod_base="OTHER" /note="2'-OMe-nucleotide"
  modified_base 5..5: /mod_base="OTHER" /note="2'-OMe-nucleotide"
  modified_base 6..6: /mod_base="OTHER" /note="2'-OMe-nucleotide"
  modified_base 7..7: /mod_base="OTHER" /note="2'-OMe-nucleotide"
  modified_base 8..8: /mod_base="OTHER" /note="2'-fluoro-nucleotide"
  modified_base 9..9: /mod_base="OTHER" /note="2'-OMe-nucleotide"
  modified_base 10..10: /mod_base="OTHER" /note="2'-fluoro-nucleotide"
  modified_base 11..11: /mod_base="OTHER" /note="2'-OMe-nucleotide"
  modified_base 12..12: /mod_base="OTHER" /note="2'-fluoro-nucleotide"
  modified_base 13..13: /mod_base="OTHER" /note="2'-fluoro-nucleotide"
  modified_base 14..14: /mod_base="OTHER" /note="2'-fluoro-nucleotide"
  modified_base 15..15: /mod_base="OTHER" /note="2'-OMe-nucleotide"
  modified_base 16..16: /mod_base="OTHER" /note="2'-OMe-nucleotide"
  modified_base 17..17: /mod_base="OTHER" /note="2'-OMe-nucleotide"
  modified_base 18..18: /mod_base="OTHER" /note="2'-OMe-nucleotide"
  modified_base 19..19: /mod_base="OTHER" /note="2'-OMe-nucleotide"
  modified_base 20..20: /mod_base="OTHER" /note="2'-OMe-nucleotide"
  misc_feature 20..21: /note="phosphorothioate bond"
  modified_base 21..21: /mod_base="OTHER" /note="2'-OMe-nucleotide"
  misc_feature 21..22: /note="phosphorothioate bond"
  modified_base 22..22: /mod_base="OTHER" /note="2'-OMe-nucleotide"
tttauugaucaagacaauucau

SEQ ID NO: 976 - DNA, 22 bp, Artificial Sequence
  Description of Artificial Sequence: Synthetic oligonucleotide
  Description of Combined DNA/RNA Molecule: Synthetic oligonucleotide
  N-term hydroxyl group
  C-term hydroxyl group
  modified_base 1..1: /mod_base="OTHER" /note="GalNAc-morpholino-thymidine analog 7"
  modified_base 2..2: /mod_base="OTHER" /note="GalNAc-morpholino-thymidine analog 7"
  modified_base 3..3: /mod_base="OTHER" /note="GalNAc-morpholino-thymidine analog 7"
  modified_base 4..4: /mod_base="OTHER" /note="2'-OMe-nucleotide"
  modified_base 5..5: /mod_base="OTHER" /note="2'-OMe-nucleotide"
  modified_base 6..6: /mod_base="OTHER" /note="2'-OMe-nucleotide"
  modified_base 7..7: /mod_base="OTHER" /note="2'-OMe-nucleotide"
  modified_base 8..8: /mod_base="OTHER" /note="2'-fluoro-nucleotide"
  modified_base 9..9: /mod_base="OTHER" /note="2'-OMe-nucleotide"
  modified_base 10..10: /mod_base="OTHER" /note="2'-fluoro-nucleotide"
  modified_base 11..11: /mod_base="OTHER" /note="2'-OMe-nucleotide"
  modified_base 12..12: /mod_base="OTHER" /note="2'-fluoro-nucleotide"
  modified_base 13..13: /mod_base="OTHER" /note="2'-fluoro-nucleotide"
  modified_base 14..14: /mod_base="OTHER" /note="2'-fluoro-nucleotide"
  modified_base 15..15: /mod_base="OTHER" /note="2'-OMe-nucleotide"
  modified_base 16..16: /mod_base="OTHER" /note="2'-OMe-nucleotide"
  modified_base 17..17: /mod_base="OTHER" /note="2'-OMe-nucleotide"
  modified_base 18..18: /mod_base="OTHER" /note="2'-OMe-nucleotide"
  modified_base 19..19: /mod_base="OTHER" /note="2'-OMe-nucleotide"
  modified_base 20..20: /mod_base="OTHER" /note="2'-OMe-nucleotide"
  misc_feature 20..21: /note="phosphorothioate bond"
  modified_base 21..21: /mod_base="OTHER" /note="2'-OMe-nucleotide"
  misc_feature 21..22: /note="phosphorothioate bond"
  modified_base 22..22: /mod_base="OTHER" /note="2'-OMe-nucleotide"
tttauugaucaagacaauucau

SEQ ID NO: 977 - DNA, 22 bp, Artificial Sequence
  Description of Artificial Sequence: Synthetic oligonucleotide
  Description of Combined DNA/RNA Molecule: Synthetic oligonucleotide
  N-term hydroxyl group
  C-term hydroxyl group
  modified_base 1..1: /mod_base="OTHER" /note="GalNAc-morpholino-thymidine analog 7"
  modified_base 2..2: /mod_base="OTHER" /note="GalNAc-morpholino-thymidine analog 7"
  modified_base 3..3: /mod_base="OTHER" /note="GalNAc-morpholino-thymidine analog 7"
  modified_base 4..4: /mod_base="OTHER" /note="2'-OMe-nucleotide"
  modified_base 5..5: /mod_base="OTHER" /note="2'-OMe-nucleotide"
  modified_base 6..6: /mod_base="OTHER" /note="2'-OMe-nucleotide"
  modified_base 7..7: /mod_base="OTHER" /note="2'-OMe-nucleotide"
  modified_base 8..8: /mod_base="OTHER" /note="2'-fluoro-nucleotide"
  modified_base 9..9: /mod_base="OTHER" /note="2'-OMe-nucleotide"
  modified_base 10..10: /mod_base="OTHER" /note="2'-fluoro-nucleotide"
  modified_base 11..11: /mod_base="OTHER" /note="2'-OMe-nucleotide"
  modified_base 12..12: /mod_base="OTHER" /note="2'-fluoro-nucleotide"
  modified_base 13..13: /mod_base="OTHER" /note="2'-fluoro-nucleotide"
  modified_base 14..14: /mod_base="OTHER" /note="2'-fluoro-nucleotide"
  modified_base 15..15: /mod_base="OTHER" /note="2'-OMe-nucleotide"
  modified_base 16..16: /mod_base="OTHER" /note="2'-OMe-nucleotide"
  modified_base 17..17: /mod_base="OTHER" /note="2'-OMe-nucleotide"
  modified_base 18..18: /mod_base="OTHER" /note="2'-OMe-nucleotide"
  modified_base 19..19: /mod_base="OTHER" /note="2'-OMe-nucleotide"
  modified_base 20..20: /mod_base="OTHER" /note="2'-OMe-nucleotide"
  misc_feature 20..21: /note="phosphorothioate bond"
  modified_base 21..21: /mod_base="OTHER" /note="2'-OMe-nucleotide"
  misc_feature 21..22: /note="phosphorothioate bond"
  modified_base 22..22: /mod_base="OTHER" /note="2'-OMe-nucleotide"
tttauugaucaagacaauucau

SEQ ID NO: 978 - DNA, 22 bp, Artificial Sequence
  Description of Artificial Sequence: Synthetic oligonucleotide
  Description of Combined DNA/RNA Molecule: Synthetic oligonucleotide
  N-term hydroxyl group
  C-term hydroxyl group
  modified_base 1..1: /mod_base="OTHER" /note="GalNAc-morpholino-thymidine analog 7"
  modified_base 2..2: /mod_base="OTHER" /note="GalNAc-morpholino-thymidine analog 7"
  modified_base 3..3: /mod_base="OTHER" /note="GalNAc-morpholino-thymidine analog 7"
  modified_base 4..4: /mod_base="OTHER" /note="Locked nucleic acid (LNA) nucleotide"
  modified_base 5..5: /mod_base="OTHER" /note="Locked nucleic acid (LNA) nucleotide"
  modified_base 6..6: /mod_base="OTHER" /note="2'-OMe-nucleotide"
  modified_base 7..7: /mod_base="OTHER" /note="2'-OMe-nucleotide"
  modified_base 8..8: /mod_base="OTHER" /note="2'-fluoro-nucleotide"
  modified_base 9..9: /mod_base="OTHER" /note="2'-OMe-nucleotide"
  modified_base 10..10: /mod_base="OTHER" /note="2'-fluoro-nucleotide"
  modified_base 11..11: /mod_base="OTHER" /note="2'-OMe-nucleotide"
  modified_base 12..12: /mod_base="OTHER" /note="2'-fluoro-nucleotide"
  modified_base 13..13: /mod_base="OTHER" /note="2'-fluoro-nucleotide"
  modified_base 14..14: /mod_base="OTHER" /note="2'-fluoro-nucleotide"
  modified_base 15..15: /mod_base="OTHER" /note="2'-OMe-nucleotide"
  modified_base 16..16: /mod_base="OTHER" /note="2'-OMe-nucleotide"
  modified_base 17..17: /mod_base="OTHER" /note="2'-OMe-nucleotide"
  modified_base 18..18: /mod_base="OTHER" /note="2'-OMe-nucleotide"
  modified_base 19..19: /mod_base="OTHER" /note="2'-OMe-nucleotide"
  modified_base 20..20: /mod_base="OTHER" /note="2'-OMe-nucleotide"
  misc_feature 20..21: /note="phosphorothioate bond"
  modified_base 21..21: /mod_base="OTHER" /note="2'-OMe-nucleotide"
  misc_feature 21..22: /note="phosphorothioate bond"
  modified_base 22..22: /mod_base="OTHER" /note="2'-OMe-nucleotide"
tttauugaucaagacaauucau

SEQ ID NO: 979 - DNA, 22 bp, Artificial Sequence
  Description of Artificial Sequence: Synthetic oligonucleotide
  Description of Combined DNA/RNA Molecule: Synthetic oligonucleotide
  N-term hydroxyl group
  C-term hydroxyl group
  modified_base 1..1: /mod_base="OTHER" /note="GalNAc-morpholino-thymidine analog 7"
  modified_base 2..2: /mod_base="OTHER" /note="GalNAc-morpholino-thymidine analog 7"
  modified_base 3..3: /mod_base="OTHER" /note="GalNAc-morpholino-thymidine analog 7"
  modified_base 4..4: /mod_base="OTHER" /note="Locked nucleic acid (LNA) nucleotide"
  modified_base 5..5: /mod_base="OTHER" /note="Locked nucleic acid (LNA) nucleotide"
  modified_base 6..6: /mod_base="OTHER" /note="2'-OMe-nucleotide"
  modified_base 7..7: /mod_base="OTHER" /note="2'-OMe-nucleotide"
  modified_base 8..8: /mod_base="OTHER" /note="2'-fluoro-nucleotide"
  modified_base 9..9: /mod_base="OTHER" /note="2'-OMe-nucleotide"
  modified_base 10..10: /mod_base="OTHER" /note="2'-fluoro-nucleotide"
  modified_base 11..11: /mod_base="OTHER" /note="2'-OMe-nucleotide"
  modified_base 12..12: /mod_base="OTHER" /note="2'-fluoro-nucleotide"
  modified_base 13..13: /mod_base="OTHER" /note="2'-fluoro-nucleotide"
  modified_base 14..14: /mod_base="OTHER" /note="2'-fluoro-nucleotide"
  modified_base 15..15: /mod_base="OTHER" /note="2'-OMe-nucleotide"
  modified_base 16..16: /mod_base="OTHER" /note="2'-OMe-nucleotide"
  modified_base 17..17: /mod_base="OTHER" /note="2'-OMe-nucleotide"
  modified_base 18..18: /mod_base="OTHER" /note="2'-OMe-nucleotide"
  modified_base 19..19: /mod_base="OTHER" /note="2'-OMe-nucleotide"
  modified_base 20..20: /mod_base="OTHER" /note="2'-OMe-nucleotide"
  misc_feature 20..21: /note="phosphorothioate bond"
  modified_base 21..21: /mod_base="OTHER" /note="2'-OMe-nucleotide"
  misc_feature 21..22: /note="phosphorothioate bond"
  modified_base 22..22: /mod_base="OTHER" /note="2'-OMe-nucleotide"
tttauugaucaagacaauucau

SEQ ID NO: 980 - DNA, 22 bp, Artificial Sequence
  Description of Artificial Sequence: Synthetic oligonucleotide
  Description of Combined DNA/RNA Molecule: Synthetic oligonucleotide
  N-term hydroxyl group
  C-term hydroxyl group
  modified_base 1..1: /mod_base="OTHER" /note="GalNAc-morpholino-thymidine analog 7"
  modified_base 2..2: /mod_base="OTHER" /note="GalNAc-morpholino-thymidine analog 7"
  modified_base 3..3: /mod_base="OTHER" /note="GalNAc-morpholino-thymidine analog 7"
  modified_base 4..4: /mod_base="OTHER" /note="Locked nucleic acid (LNA) nucleotide"
  modified_base 5..5: /mod_base="OTHER" /note="Locked nucleic acid (LNA) nucleotide"
  modified_base 6..6: /mod_base="OTHER" /note="2'-OMe-nucleotide"
  modified_base 7..7: /mod_base="OTHER" /note="2'-OMe-nucleotide"
  modified_base 8..8: /mod_base="OTHER" /note="2'-fluoro-nucleotide"
  modified_base 9..9: /mod_base="OTHER" /note="2'-OMe-nucleotide"
  modified_base 10..10: /mod_base="OTHER" /note="2'-fluoro-nucleotide"
  modified_base 11..11: /mod_base="OTHER" /note="2'-OMe-nucleotide"
  modified_base 12..12: /mod_base="OTHER" /note="2'-fluoro-nucleotide"
  modified_base 13..13: /mod_base="OTHER" /note="2'-fluoro-nucleotide"
  modified_base 14..14: /mod_base="OTHER" /note="2'-fluoro-nucleotide"
  modified_base 15..15: /mod_base="OTHER" /note="2'-OMe-nucleotide"
  modified_base 16..16: /mod_base="OTHER" /note="2'-OMe-nucleotide"
  modified_base 17..17: /mod_base="OTHER" /note="2'-OMe-nucleotide"
  modified_base 18..18: /mod_base="OTHER" /note="2'-OMe-nucleotide"
  modified_base 19..19: /mod_base="OTHER" /note="2'-OMe-nucleotide"
  modified_base 20..20: /mod_base="OTHER" /note="2'-OMe-nucleotide"
  misc_feature 20..21: /note="phosphorothioate bond"
  modified_base 21..21: /mod_base="OTHER" /note="2'-OMe-nucleotide"
  misc_feature 21..22: /note="phosphorothioate bond"
  modified_base 22..22: /mod_base="OTHER" /note="2'-OMe-nucleotide"
tttauugaucaagacaauucau

SEQ ID NO: 981 - DNA, 22 bp, Artificial Sequence
  Description of Artificial Sequence: Synthetic oligonucleotide
  Description of Combined DNA/RNA Molecule: Synthetic oligonucleotide
  N-term hydroxyl group
  C-term hydroxyl group
  modified_base 1..1: /mod_base="OTHER" /note="GalNAc-morpholino-thymidine analog 7"
  modified_base 2..2: /mod_base="OTHER" /note="GalNAc-morpholino-thymidine analog 7"
  modified_base 3..3: /mod_base="OTHER" /note="GalNAc-morpholino-thymidine analog 7"
  modified_base 4..4: /mod_base="OTHER" /note="Locked nucleic acid (LNA) nucleotide"
  modified_base 5..5: /mod_base="OTHER" /note="Locked nucleic acid (LNA) nucleotide"
  modified_base 6..6: /mod_base="OTHER" /note="2'-OMe-nucleotide"
  modified_base 7..7: /mod_base="OTHER" /note="2'-OMe-nucleotide"
  modified_base 8..8: /mod_base="OTHER" /note="2'-fluoro-nucleotide"
  modified_base 9..9: /mod_base="OTHER" /note="2'-OMe-nucleotide"
  modified_base 10..10: /mod_base="OTHER" /note="2'-fluoro-nucleotide"
  modified_base 11..11: /mod_base="OTHER" /note="2'-OMe-nucleotide"
  modified_base 12..12: /mod_base="OTHER" /note="2'-fluoro-nucleotide"
  modified_base 13..13: /mod_base="OTHER" /note="2'-fluoro-nucleotide"
  modified_base 14..14: /mod_base="OTHER" /note="2'-fluoro-nucleotide"
  modified_base 15..15: /mod_base="OTHER" /note="2'-OMe-nucleotide"
  modified_base 16..16: /mod_base="OTHER" /note="2'-OMe-nucleotide"
  modified_base 17..17: /mod_base="OTHER" /note="2'-OMe-nucleotide"
  modified_base 18..18: /mod_base="OTHER" /note="2'-OMe-nucleotide"
  modified_base 19..19: /mod_base="OTHER" /note="2'-OMe-nucleotide"
  modified_base 20..20: /mod_base="OTHER" /note="2'-OMe-nucleotide"
  misc_feature 20..21: /note="phosphorothioate bond"
  modified_base 21..21: /mod_base="OTHER" /note="2'-OMe-nucleotide"
  misc_feature 21..22: /note="phosphorothioate bond"
  modified_base 22..22: /mod_base="OTHER" /note="2'-OMe-nucleotide"
tttauugaucaagacaauucau

SEQ ID NO: 982 - DNA, 22 bp, Artificial Sequence
  Description of Artificial Sequence: Synthetic oligonucleotide
  Description of Combined DNA/RNA Molecule: Synthetic oligonucleotide
  N-term hydroxyl group
  C-term hydroxyl group
  modified_base 1..1: /mod_base="OTHER" /note="GalNAc-morpholino-thymidine analog 7"
  modified_base 2..2: /mod_base="OTHER" /note="GalNAc-morpholino-thymidine analog 7"
  modified_base 3..3: /mod_base="OTHER" /note="GalNAc-morpholino-thymidine analog 7"
  modified_base 4..4: /mod_base="OTHER" /note="Locked nucleic acid (LNA) nucleotide"
  modified_base 5..5: /mod_base="OTHER" /note="Locked nucleic acid (LNA) nucleotide"
  modified_base 6..6: /mod_base="OTHER" /note="2'-OMe-nucleotide"
  modified_base 7..7: /mod_base="OTHER" /note="2'-OMe-nucleotide"
  modified_base 8..8: /mod_base="OTHER" /note="2'-fluoro-nucleotide"
  modified_base 9..9: /mod_base="OTHER" /note="2'-OMe-nucleotide"
  modified_base 10..10: /mod_base="OTHER" /note="2'-fluoro-nucleotide"
  modified_base 11..11: /mod_base="OTHER" /note="2'-OMe-nucleotide"
  modified_base 12..12: /mod_base="OTHER" /note="2'-fluoro-nucleotide"
  modified_base 13..13: /mod_base="OTHER" /note="2'-fluoro-nucleotide"
  modified_base 14..14: /mod_base="OTHER" /note="2'-fluoro-nucleotide"
  modified_base 15..15: /mod_base="OTHER" /note="2'-OMe-nucleotide"
  modified_base 16..16: /mod_base="OTHER" /note="2'-OMe-nucleotide"
  modified_base 17..17: /mod_base="OTHER" /note="2'-OMe-nucleotide"
  modified_base 18..18: /mod_base="OTHER" /note="2'-OMe-nucleotide"
  modified_base 19..19: /mod_base="OTHER" /note="2'-OMe-nucleotide"
  modified_base 20..20: /mod_base="OTHER" /note="2'-OMe-nucleotide"
  misc_feature 20..21: /note="phosphorothioate bond"
  modified_base 21..21: /mod_base="OTHER" /note="2'-OMe-nucleotide"
  misc_feature 21..22: /note="phosphorothioate bond"
  modified_base 22..22: /mod_base="OTHER" /note="2'-OMe-nucleotide"
tttauugaucaagacaauucau

SEQ ID NO: 983 - DNA, 22 bp, Artificial Sequence
  Description of Artificial Sequence: Synthetic oligonucleotide
  Description of Combined DNA/RNA Molecule: Synthetic oligonucleotide
  N-term hydroxyl group
  C-term hydroxyl group
  modified_base 1..1: /mod_base="OTHER" /note="GalNAc-morpholino-thymidine analog 7"
  modified_base 2..2: /mod_base="OTHER" /note="GalNAc-morpholino-thymidine analog 7"
  modified_base 3..3: /mod_base="OTHER" /note="GalNAc-morpholino-thymidine analog 7"
  modified_base 4..4: /mod_base="OTHER" /note="2'-OMe-nucleotide"
  modified_base 5..5: /mod_base="OTHER" /note="2'-OMe-nucleotide"
  modified_base 6..6: /mod_base="OTHER" /note="2'-OMe-nucleotide"
  modified_base 7..7: /mod_base="OTHER" /note="2'-OMe-nucleotide"
  modified_base 8..8: /mod_base="OTHER" /note="2'-fluoro-nucleotide"
  modified_base 9..9: /mod_base="OTHER" /note="2'-OMe-nucleotide"
  modified_base 10..10: /mod_base="OTHER" /note="2'-fluoro-nucleotide"
  modified_base 11..11: /mod_base="OTHER" /note="2'-fluoro-nucleotide"
  modified_base 12..12: /mod_base="OTHER" /note="2'-fluoro-nucleotide"
  modified_base 13..13: /mod_base="OTHER" /note="2'-OMe-nucleotide"
  modified_base 14..14: /mod_base="OTHER" /note="2'-OMe-nucleotide"
  modified_base 15..15: /mod_base="OTHER" /note="2'-OMe-nucleotide"
  modified_base 16..16: /mod_base="OTHER" /note="2'-OMe-nucleotide"
  modified_base 17..17: /mod_base="OTHER" /note="2'-OMe-nucleotide"
  modified_base 18..18: /mod_base="OTHER" /note="2'-OMe-nucleotide"
  modified_base 19..19: /mod_base="OTHER" /note="2'-OMe-nucleotide"
  modified_base 20..20: /mod_base="OTHER" /note="2'-OMe-nucleotide"
  modified_base 21..21: /mod_base="OTHER" /note="Cyclohexane-morpholino-thymidine analog 4"
  modified_base 22..22: /mod_base="OTHER" /note="Cyclohexane-morpholino-thymidine analog 4"
tttauugaucaagacaauuctt

SEQ ID NO: 984 - DNA, 22 bp, Artificial Sequence
  Description of Artificial Sequence: Synthetic oligonucleotide
  Description of Combined DNA/RNA Molecule: Synthetic oligonucleotide
  N-term hydroxyl group
  C-term hydroxyl group
  modified_base 1..1: /mod_base="OTHER" /note="GalNAc-morpholino-thymidine analog 7"
  modified_base 2..2: /mod_base="OTHER" /note="GalNAc-morpholino-thymidine analog 7"
  modified_base 3..3: /mod_base="OTHER" /note="GalNAc-morpholino-thymidine analog 7"
  modified_base 4..4: /mod_base="OTHER" /note="2'-OMe-nucleotide"
  modified_base 5..5: /mod_base="OTHER" /note="2'-OMe-nucleotide"
  modified_base 6..6: /mod_base="OTHER" /note="2'-OMe-nucleotide"
  modified_base 7..7: /mod_base="OTHER" /note="2'-OMe-nucleotide"
  modified_base 8..8: /mod_base="OTHER" /note="2'-fluoro-nucleotide"
  modified_base 9..9: /mod_base="OTHER" /note="2'-OMe-nucleotide"
  modified_base 10..10: /mod_base="OTHER" /note="2'-fluoro-nucleotide"
  modified_base 11..11: /mod_base="OTHER" /note="2'-fluoro-nucleotide"
  modified_base 12..12: /mod_base="OTHER" /note="2'-fluoro-nucleotide"
  modified_base 13..13: /mod_base="OTHER" /note="2'-OMe-nucleotide"
  modified_base 14..14: /mod_base="OTHER" /note="2'-OMe-nucleotide"
  modified_base 15..15: /mod_base="OTHER" /note="2'-OMe-nucleotide"
  modified_base 16..16: /mod_base="OTHER" /note="2'-OMe-nucleotide"
  modified_base 17..17: /mod_base="OTHER" /note="2'-OMe-nucleotide"
  modified_base 18..18: /mod_base="OTHER" /note="2'-OMe-nucleotide"
  modified_base 19..19: /mod_base="OTHER" /note="2'-OMe-nucleotide"
  modified_base 20..20: /mod_base="OTHER" /note="2'-OMe-nucleotide"
  modified_base 21..21: /mod_base="OTHER" /note="Cyclohexane-morpholino-thymidine analog 4"
  modified_base 22..22: /mod_base="OTHER" /note="Cyclohexane-morpholino-thymidine analog 4"
tttauugaucaagacaauuctt

SEQ ID NO: 985 - DNA, 22 bp, Artificial Sequence
  Description of Artificial Sequence: Synthetic oligonucleotide
  Description of Combined DNA/RNA Molecule: Synthetic oligonucleotide
  N-term hydroxyl group
  C-term hydroxyl group
  modified_base 1..1: /mod_base="OTHER" /note="GalNAc-morpholino-thymidine analog 7"
  modified_base 2..2: /mod_base="OTHER" /note="GalNAc-morpholino-thymidine analog 7"
  modified_base 3..3: /mod_base="OTHER" /note="GalNAc-morpholino-thymidine analog 7"
  modified_base 4..4: /mod_base="OTHER" /note="2'-OMe-nucleotide"
  modified_base 5..5: /mod_base="OTHER" /note="2'-OMe-nucleotide"
  modified_base 6..6: /mod_base="OTHER" /note="2'-OMe-nucleotide"
  modified_base 7..7: /mod_base="OTHER" /note="2'-OMe-nucleotide"
  modified_base 8..8: /mod_base="OTHER" /note="2'-fluoro-nucleotide"
  modified_base 9..9: /mod_base="OTHER" /note="2'-OMe-nucleotide"
  modified_base 10..10: /mod_base="OTHER" /note="2'-fluoro-nucleotide"
  modified_base 11..11: /mod_base="OTHER" /note="2'-fluoro-nucleotide"
  modified_base 12..12: /mod_base="OTHER" /note="2'-fluoro-nucleotide"
  modified_base 13..13: /mod_base="OTHER" /note="2'-OMe-nucleotide"
  modified_base 14..14: /mod_base="OTHER" /note="2'-OMe-nucleotide"
  modified_base 15..15: /mod_base="OTHER" /note="2'-OMe-nucleotide"
  modified_base 16..16: /mod_base="OTHER" /note="2'-OMe-nucleotide"
  modified_base 17..17: /mod_base="OTHER" /note="2'-OMe-nucleotide"
  modified_base 18..18: /mod_base="OTHER" /note="2'-OMe-nucleotide"
  modified_base 19..19: /mod_base="OTHER" /note="2'-OMe-nucleotide"
  modified_base 20..20: /mod_base="OTHER" /note="2'-OMe-nucleotide"
  modified_base 21..21: /mod_base="OTHER" /note="Cyclohexane-morpholino-thymidine analog 4"
  modified_base 22..22: /mod_base="OTHER" /note="Cyclohexane-morpholino-thymidine analog 4"
tttauugaucaagacaauuctt

SEQ ID NO: 986 - DNA, 22 bp, Artificial Sequence
  Description of Artificial Sequence: Synthetic oligonucleotide
  Description of Combined DNA/RNA Molecule: Synthetic oligonucleotide
  N-term hydroxyl group
  C-term hydroxyl group
  modified_base 1..1: /mod_base="OTHER" /note="GalNAc-morpholino-thymidine analog 7"
  modified_base 2..2: /mod_base="OTHER" /note="GalNAc-morpholino-thymidine analog 7"
  modified_base 3..3: /mod_base="OTHER" /note="GalNAc-morpholino-thymidine analog 7"
  modified_base 4..4: /mod_base="OTHER" /note="2'-OMe-nucleotide"
  modified_base 5..5: /mod_base="OTHER" /note="2'-OMe-nucleotide"
  modified_base 6..6: /mod_base="OTHER" /note="2'-OMe-nucleotide"
  modified_base 7..7: /mod_base="OTHER" /note="2'-OMe-nucleotide"
  modified_base 8..8: /mod_base="OTHER" /note="2'-fluoro-nucleotide"
  modified_base 9..9: /mod_base="OTHER" /note="2'-OMe-nucleotide"
  modified_base 10..10: /mod_base="OTHER" /note="2'-fluoro-nucleotide"
  modified_base 11..11: /mod_base="OTHER" /note="2'-fluoro-nucleotide"
  modified_base 12..12: /mod_base="OTHER" /note="2'-fluoro-nucleotide"
  modified_base 13..13: /mod_base="OTHER" /note="2'-OMe-nucleotide"
  modified_base 14..14: /mod_base="OTHER" /note="2'-OMe-nucleotide"
  modified_base 15..15: /mod_base="OTHER" /note="2'-OMe-nucleotide"
  modified_base 16..16: /mod_base="OTHER" /note="2'-OMe-nucleotide"
  modified_base 17..17: /mod_base="OTHER" /note="2'-OMe-nucleotide"
  modified_base 18..18: /mod_base="OTHER" /note="2'-OMe-nucleotide"
  modified_base 19..19: /mod_base="OTHER" /note="2'-OMe-nucleotide"
  modified_base 20..20: /mod_base="OTHER" /note="2'-OMe-nucleotide"
  modified_base 21..21: /mod_base="OTHER" /note="Cyclohexane-morpholino-thymidine analog 4"
  modified_base 22..22: /mod_base="OTHER" /note="Cyclohexane-morpholino-thymidine analog 4"
tttauugaucaagacaauuctt

SEQ ID NO: 987 - DNA, 22 bp, Artificial Sequence
  Description of Artificial Sequence: Synthetic oligonucleotide
  Description of Combined DNA/RNA Molecule: Synthetic oligonucleotide
  N-term hydroxyl group
  C-term hydroxyl group
  modified_base 1..1: /mod_base="OTHER" /note="GalNAc-morpholino-thymidine analog 7"
  modified_base 2..2: /mod_base="OTHER" /note="GalNAc-morpholino-thymidine analog 7"
  modified_base 3..3: /mod_base="OTHER" /note="GalNAc-morpholino-thymidine analog 7"
  modified_base 4..4: /mod_base="OTHER" /note="Locked nucleic acid (LNA) nucleotide"
  modified_base 5..5: /mod_base="OTHER" /note="Locked nucleic acid (LNA) nucleotide"
  modified_base 6..6: /mod_base="OTHER" /note="2'-OMe-nucleotide"
  modified_base 7..7: /mod_base="OTHER" /note="2'-OMe-nucleotide"
  modified_base 8..8: /mod_base="OTHER" /note="2'-fluoro-nucleotide"
  modified_base 9..9: /mod_base="OTHER" /note="2'-OMe-nucleotide"
  modified_base 10..10: /mod_base="OTHER" /note="2'-fluoro-nucleotide"
  modified_base 11..11: /mod_base="OTHER" /note="2'-fluoro-nucleotide"
  modified_base 12..12: /mod_base="OTHER" /note="2'-fluoro-nucleotide"
  modified_base 13..13: /mod_base="OTHER" /note="2'-OMe-nucleotide"
  modified_base 14..14: /mod_base="OTHER" /note="2'-OMe-nucleotide"
  modified_base 15..15: /mod_base="OTHER" /note="2'-OMe-nucleotide"
  modified_base 16..16: /mod_base="OTHER" /note="2'-OMe-nucleotide"
  modified_base 17..17: /mod_base="OTHER" /note="2'-OMe-nucleotide"
  modified_base 18..18: /mod_base="OTHER" /note="2'-OMe-nucleotide"
  modified_base 19..19: /mod_base="OTHER" /note="2'-OMe-nucleotide"
  modified_base 20..20: /mod_base="OTHER" /note="2'-OMe-nucleotide"
  modified_base 21..21: /mod_base="OTHER" /note="Cyclohexane-morpholino-thymidine analog 4"
  modified_base 22..22: /mod_base="OTHER" /note="Cyclohexane-morpholino-thymidine analog 4"
tttauugaucaagacaauuctt

SEQ ID NO: 988 - DNA, 22 bp, Artificial Sequence
  Description of Artificial Sequence: Synthetic oligonucleotide
  Description of Combined DNA/RNA Molecule: Synthetic oligonucleotide
  N-term hydroxyl group
  C-term hydroxyl group
  modified_base 1..1: /mod_base="OTHER" /note="GalNAc-morpholino-thymidine analog 7"
  modified_base 2..2: /mod_base="OTHER" /note="GalNAc-morpholino-thymidine analog 7"
  modified_base 3..3: /mod_base="OTHER" /note="GalNAc-morpholino-thymidine analog 7"
  modified_base 4..4: /mod_base="OTHER" /note="Locked nucleic acid (LNA) nucleotide"
  modified_base 5..5: /mod_base="OTHER" /note="Locked nucleic acid (LNA) nucleotide"
  modified_base 6..6: /mod_base="OTHER" /note="2'-OMe-nucleotide"
  modified_base 7..7: /mod_base="OTHER" /note="2'-OMe-nucleotide"
  modified_base 8..8: /mod_base="OTHER" /note="2'-fluoro-nucleotide"
  modified_base 9..9: /mod_base="OTHER" /note="2'-OMe-nucleotide"
  modified_base 10..10: /mod_base="OTHER" /note="2'-fluoro-nucleotide"
  modified_base 11..11: /mod_base="OTHER" /note="2'-fluoro-nucleotide"
  modified_base 12..12: /mod_base="OTHER" /note="2'-fluoro-nucleotide"
  modified_base 13..13: /mod_base="OTHER" /note="2'-OMe-nucleotide"
  modified_base 14..14: /mod_base="OTHER" /note="2'-OMe-nucleotide"
  modified_base 15..15: /mod_base="OTHER" /note="2'-OMe-nucleotide"
  modified_base 16..16: /mod_base="OTHER" /note="2'-OMe-nucleotide"
  modified_base 17..17: /mod_base="OTHER" /note="2'-OMe-nucleotide"
  modified_base 18..18: /mod_base="OTHER" /note="2'-OMe-nucleotide"
  modified_base 19..19: /mod_base="OTHER" /note="2'-OMe-nucleotide"
  modified_base 20..20: /mod_base="OTHER" /note="2'-OMe-nucleotide"
  modified_base 21..21: /mod_base="OTHER" /note="Cyclohexane-morpholino-thymidine analog 4"
  modified_base 22..22: /mod_base="OTHER" /note="Cyclohexane-morpholino-thymidine analog 4"
tttauugaucaagacaauuctt

SEQ ID NO: 989 - DNA, 22 bp, Artificial Sequence
  Description of Artificial Sequence: Synthetic oligonucleotide
  Description of Combined DNA/RNA Molecule: Synthetic oligonucleotide
  N-term hydroxyl group
  C-term hydroxyl group
  modified_base 1..1: /mod_base="OTHER" /note="GalNAc-morpholino-thymidine analog 7"
  modified_base 2..2: /mod_base="OTHER" /note="GalNAc-morpholino-thymidine analog 7"
  modified_base 3..3: /mod_base="OTHER" /note="GalNAc-morpholino-thymidine analog 7"
  modified_base 4..4: /mod_base="OTHER" /note="Locked nucleic acid (LNA) nucleotide"
  modified_base 5..5: /mod_base="OTHER" /note="Locked nucleic acid (LNA) nucleotide"
  modified_base 6..6: /mod_base="OTHER" /note="2'-OMe-nucleotide"
  modified_base 7..7: /mod_base="OTHER" /note="2'-OMe-nucleotide"
  modified_base 8..8: /mod_base="OTHER" /note="2'-fluoro-nucleotide"
  modified_base 9..9: /mod_base="OTHER" /note="2'-OMe-nucleotide"
  modified_base 10..10: /mod_base="OTHER" /note="2'-fluoro-nucleotide"
  modified_base 11..11: /mod_base="OTHER" /note="2'-fluoro-nucleotide"
  modified_base 12..12: /mod_base="OTHER" /note="2'-fluoro-nucleotide"
  modified_base 13..13: /mod_base="OTHER" /note="2'-OMe-nucleotide"
  modified_base 14..14: /mod_base="OTHER" /note="2'-OMe-nucleotide"
  modified_base 15..15: /mod_base="OTHER" /note="2'-OMe-nucleotide"
  modified_base 16..16: /mod_base="OTHER" /note="2'-OMe-nucleotide"
  modified_base 17..17: /mod_base="OTHER" /note="2'-OMe-nucleotide"
  modified_base 18..18: /mod_base="OTHER" /note="2'-OMe-nucleotide"
  modified_base 19..19: /mod_base="OTHER" /note="2'-OMe-nucleotide"
  modified_base 20..20: /mod_base="OTHER" /note="2'-OMe-nucleotide"
  modified_base 21..21: /mod_base="OTHER" /note="Cyclohexane-morpholino-thymidine analog 4"
  modified_base 22..22: /mod_base="OTHER" /note="Cyclohexane-morpholino-thymidine analog 4"
tttauugaucaagacaauuctt

SEQ ID NO: 990 - DNA, 22 bp, Artificial Sequence
  Description of Artificial Sequence: Synthetic oligonucleotide
  Description of Combined DNA/RNA Molecule: Synthetic oligonucleotide
  N-term hydroxyl group
  C-term hydroxyl group
  modified_base 1..1: /mod_base="OTHER" /note="GalNAc-morpholino-thymidine analog 7"
  modified_base 2..2: /mod_base="OTHER" /note="GalNAc-morpholino-thymidine analog 7"
  modified_base 3..3: /mod_base="OTHER" /note="GalNAc-morpholino-thymidine analog 7"
  modified_base 4..4: /mod_base="OTHER" /note="Locked nucleic acid (LNA) nucleotide"
  modified_base 5..5: /mod_base="OTHER" /note="Locked nucleic acid (LNA) nucleotide"
  modified_base 6..6: /mod_base="OTHER" /note="2'-OMe-nucleotide"
  modified_base 7..7: /mod_base="OTHER" /note="2'-OMe-nucleotide"
  modified_base 8..8: /mod_base="OTHER" /note="2'-fluoro-nucleotide"
  modified_base 9..9: /mod_base="OTHER" /note="2'-OMe-nucleotide"
  modified_base 10..10: /mod_base="OTHER" /note="2'-fluoro-nucleotide"
  modified_base 11..11: /mod_base="OTHER" /note="2'-fluoro-nucleotide"
  modified_base 12..12: /mod_base="OTHER" /note="2'-fluoro-nucleotide"
  modified_base 13..13: /mod_base="OTHER" /note="2'-OMe-nucleotide"
  modified_base 14..14: /mod_base="OTHER" /note="2'-OMe-nucleotide"
  modified_base 15..15: /mod_base="OTHER" /note="2'-OMe-nucleotide"
  modified_base 16..16: /mod_base="OTHER" /note="2'-OMe-nucleotide"
  modified_base 17..17: /mod_base="OTHER" /note="2'-OMe-nucleotide"
  modified_base 18..18: /mod_base="OTHER" /note="2'-OMe-nucleotide"
  modified_base 19..19: /mod_base="OTHER" /note="2'-OMe-nucleotide"
  modified_base 20..20: /mod_base="OTHER" /note="2'-OMe-nucleotide"
  modified_base 21..21: /mod_base="OTHER" /note="Cyclohexane-morpholino-thymidine analog 4"
  modified_base 22..22: /mod_base="OTHER" /note="Cyclohexane-morpholino-thymidine analog 4"
tttauugaucaagacaauuctt

SEQ ID NO: 991 - DNA, 22 bp, Artificial Sequence
  Description of Artificial Sequence: Synthetic oligonucleotide
  Description of Combined DNA/RNA Molecule: Synthetic oligonucleotide
  N-term hydroxyl group
  C-term hydroxyl group
  modified_base 1..1: /mod_base="OTHER" /note="GalNAc-morpholino-thymidine analog 7"
  modified_base 2..2: /mod_base="OTHER" /note="GalNAc-morpholino-thymidine analog 7"
  modified_base 3..3: /mod_base="OTHER" /note="GalNAc-morpholino-thymidine analog 7"
  modified_base 4..4: /mod_base="OTHER" /note="2'-OMe-nucleotide"
  modified_base 5..5: /mod_base="OTHER" /note="2'-OMe-nucleotide"
  modified_base 6..6: /mod_base="OTHER" /note="2'-OMe-nucleotide"
  modified_base 7..7: /mod_base="OTHER" /note="2'-OMe-nucleotide"
  modified_base 8..8: /mod_base="OTHER" /note="2'-fluoro-nucleotide"
  modified_base 9..9: /mod_base="OTHER" /note="2'-OMe-nucleotide"
  modified_base 10..10: /mod_base="OTHER" /note="2'-fluoro-nucleotide"
  modified_base 11..11: /mod_base="OTHER" /note="2'-OMe-nucleotide"
  modified_base 12..12: /mod_base="OTHER" /note="2'-fluoro-nucleotide"
  modified_base 13..13: /mod_base="OTHER" /note="2'-fluoro-nucleotide"
  modified_base 14..14: /mod_base="OTHER" /note="2'-fluoro-nucleotide"
  modified_base 15..15: /mod_base="OTHER" /note="2'-OMe-nucleotide"
  modified_base 16..16: /mod_base="OTHER" /note="2'-OMe-nucleotide"
  modified_base 17..17: /mod_base="OTHER" /note="2'-OMe-nucleotide"
  modified_base 18..18: /mod_base="OTHER" /note="2'-OMe-nucleotide"
  modified_base 19..19: /mod_base="OTHER" /note="2'-OMe-nucleotide"
  modified_base 20..20: /mod_base="OTHER" /note="2'-OMe-nucleotide"
  modified_base 21..21: /mod_base="OTHER" /note="Cyclohexane-morpholino-thymidine analog 4"
  modified_base 22..22: /mod_base="OTHER" /note="Cyclohexane-morpholino-thymidine analog 4"
tttauugaucaagacaauuctt

SEQ ID NO: 992 - DNA, 22 bp, Artificial Sequence
  Description of Artificial Sequence: Synthetic oligonucleotide
  Description of Combined DNA/RNA Molecule: Synthetic oligonucleotide
  N-term hydroxyl group
  C-term hydroxyl group
  modified_base 1..1: /mod_base="OTHER" /note="GalNAc-morpholino-thymidine analog 7"
  modified_base 2..2: /mod_base="OTHER" /note="GalNAc-morpholino-thymidine analog 7"
  modified_base 3..3: /mod_base="OTHER" /note="GalNAc-morpholino-thymidine analog 7"
  modified_base 4..4: /mod_base="OTHER" /note="2'-OMe-nucleotide"
  modified_base 5..5: /mod_base="OTHER" /note="2'-OMe-nucleotide"
  modified_base 6..6: /mod_base="OTHER" /note="2'-OMe-nucleotide"
  modified_base 7..7: /mod_base="OTHER" /note="2'-OMe-nucleotide"
  modified_base 8..8: /mod_base="OTHER" /note="2'-fluoro-nucleotide"
  modified_base 9..9: /mod_base="OTHER" /note="2'-OMe-nucleotide"
  modified_base 10..10: /mod_base="OTHER" /note="2'-fluoro-nucleotide"
  modified_base 11..11: /mod_base="OTHER" /note="2'-OMe-nucleotide"
  modified_base 12..12: /mod_base="OTHER" /note="2'-fluoro-nucleotide"
  modified_base 13..13: /mod_base="OTHER" /note="2'-fluoro-nucleotide"
  modified_base 14..14: /mod_base="OTHER" /note="2'-fluoro-nucleotide"
  modified_base 15..15: /mod_base="OTHER" /note="2'-OMe-nucleotide"
  modified_base 16..16: /mod_base="OTHER" /note="2'-OMe-nucleotide"
  modified_base 17..17: /mod_base="OTHER" /note="2'-OMe-nucleotide"
  modified_base 18..18: /mod_base="OTHER" /note="2'-OMe-nucleotide"
  modified_base 19..19: /mod_base="OTHER" /note="2'-OMe-nucleotide"
  modified_base 20..20: /mod_base="OTHER" /note="2'-OMe-nucleotide"
  modified_base 21..21: /mod_base="OTHER" /note="Cyclohexane-morpholino-thymidine analog 4"
  modified_base 22..22: /mod_base="OTHER" /note="Cyclohexane-morpholino-thymidine analog 4"
tttauugaucaagacaauuctt

SEQ ID NO: 993 - DNA, 22 bp, Artificial Sequence
  Description of Artificial Sequence: Synthetic oligonucleotide
  Description of Combined DNA/RNA Molecule: Synthetic oligonucleotide
  N-term hydroxyl group
  C-term hydroxyl group
  modified_base 1..1: /mod_base="OTHER" /note="GalNAc-morpholino-thymidine analog 7"
  modified_base 2..2: /mod_base="OTHER" /note="GalNAc-morpholino-thymidine analog 7"
  modified_base 3..3: /mod_base="OTHER" /note="GalNAc-morpholino-thymidine analog 7"
  modified_base 4..4: /mod_base="OTHER" /note="2'-OMe-nucleotide"
  modified_base 5..5: /mod_base="OTHER" /note="2'-OMe-nucleotide"
  modified_base 6..6: /mod_base="OTHER" /note="2'-OMe-nucleotide"
  modified_base 7..7: /mod_base="OTHER" /note="2'-OMe-nucleotide"
  modified_base 8..8: /mod_base="OTHER" /note="2'-fluoro-nucleotide"
  modified_base 9..9: /mod_base="OTHER" /note="2'-OMe-nucleotide"
  modified_base 10..10: /mod_base="OTHER" /note="2'-fluoro-nucleotide"
  modified_base 11..11: /mod_base="OTHER" /note="2'-OMe-nucleotide"
  modified_base 12..12: /mod_base="OTHER" /note="2'-fluoro-nucleotide"
  modified_base 13..13: /mod_base="OTHER" /note="2'-fluoro-nucleotide"
  modified_base 14..14: /mod_base="OTHER" /note="2'-fluoro-nucleotide"
  modified_base 15..15: /mod_base="OTHER" /note="2'-OMe-nucleotide"
  modified_base 16..16: /mod_base="OTHER" /note="2'-OMe-nucleotide"
  modified_base 17..17: /mod_base="OTHER" /note="2'-OMe-nucleotide"
  modified_base 18..18: /mod_base="OTHER" /note="2'-OMe-nucleotide"
  modified_base 19..19: /mod_base="OTHER" /note="2'-OMe-nucleotide"
  modified_base 20..20: /mod_base="OTHER" /note="2'-OMe-nucleotide"
  modified_base 21..21: /mod_base="OTHER" /note="Cyclohexane-morpholino-thymidine analog 4"
  modified_base 22..22: /mod_base="OTHER" /note="Cyclohexane-morpholino-thymidine analog 4"
tttauugaucaagacaauuctt

SEQ ID NO: 994 - DNA, 22 bp, Artificial Sequence
  Description of Artificial Sequence: Synthetic oligonucleotide
  Description of Combined DNA/RNA Molecule: Synthetic oligonucleotide
  N-term hydroxyl group
  C-term hydroxyl group
  modified_base 1..1: /mod_base="OTHER" /note="GalNAc-morpholino-thymidine analog 7"
  modified_base 2..2: /mod_base="OTHER" /note="GalNAc-morpholino-thymidine analog 7"
  modified_base 3..3: /mod_base="OTHER" /note="GalNAc-morpholino-thymidine analog 7"
  modified_base 4..4: /mod_base="OTHER" /note="2'-OMe-nucleotide"
  modified_base 5..5: /mod_base="OTHER" /note="2'-OMe-nucleotide"
  modified_base 6..6: /mod_base="OTHER" /note="2'-OMe-nucleotide"
  modified_base 7..7: /mod_base="OTHER" /note="2'-OMe-nucleotide"
  modified_base 8..8: /mod_base="OTHER" /note="2'-fluoro-nucleotide"
  modified_base 9..9: /mod_base="OTHER" /note="2'-OMe-nucleotide"
  modified_base 10..10: /mod_base="OTHER" /note="2'-fluoro-nucleotide"
  modified_base 11..11: /mod_base="OTHER" /note="2'-OMe-nucleotide"
  modified_base 12..12: /mod_base="OTHER" /note="2'-fluoro-nucleotide"
  modified_base 13..13: /mod_base="OTHER" /note="2'-fluoro-nucleotide"
  modified_base 14..14: /mod_base="OTHER" /note="2'-fluoro-nucleotide"
  modified_base 15..15: /mod_base="OTHER" /note="2'-OMe-nucleotide"
  modified_base 16..16: /mod_base="OTHER" /note="2'-OMe-nucleotide"
  modified_base 17..17: /mod_base="OTHER" /note="2'-OMe-nucleotide"
  modified_base 18..18: /mod_base="OTHER" /note="2'-OMe-nucleotide"
  modified_base 19..19: /mod_base="OTHER" /note="2'-OMe-nucleotide"
  modified_base 20..20: /mod_base="OTHER" /note="2'-OMe-nucleotide"
  modified_base 21..21: /mod_base="OTHER" /note="Cyclohexane-morpholino-thymidine analog 4"
  modified_base 22..22: /mod_base="OTHER" /note="Cyclohexane-morpholino-thymidine analog 4"
tttauugaucaagacaauuctt

SEQ ID NO: 995 - DNA, 22 bp, Artificial Sequence
  Description of Artificial Sequence: Synthetic oligonucleotide
  Description of Combined DNA/RNA Molecule: Synthetic oligonucleotide
  N-term hydroxyl group
  C-term hydroxyl group
  modified_base 1..1: /mod_base="OTHER" /note="GalNAc-morpholino-thymidine analog 7"
  modified_base 2..2: /mod_base="OTHER" /note="GalNAc-morpholino-thymidine analog 7"
  modified_base 3..3: /mod_base="OTHER" /note="GalNAc-morpholino-thymidine analog 7"
  modified_base 4..4: /mod_base="OTHER" /note="2'-OMe-nucleotide"
  modified_base 5..5: /mod_base="OTHER" /note="2'-OMe-nucleotide"
  modified_base 6..6: /mod_base="OTHER" /note="2'-OMe-nucleotide"
  modified_base 7..7: /mod_base="OTHER" /note="2'-OMe-nucleotide"
  modified_base 8..8: /mod_base="OTHER" /note="2'-fluoro-nucleotide"
  modified_base 9..9: /mod_base="OTHER" /note="2'-OMe-nucleotide"
  modified_base 10..10: /mod_base="OTHER" /note="2'-fluoro-nucleotide"
  modified_base 11..11: /mod_base="OTHER" /note="2'-OMe-nucleotide"
  modified_base 12..12: /mod_base="OTHER" /note="2'-fluoro-nucleotide"
  modified_base 13..13: /mod_base="OTHER" /note="2'-fluoro-nucleotide"
  modified_base 14..14: /mod_base="OTHER" /note="2'-fluoro-nucleotide"
  modified_base 15..15: /mod_base="OTHER" /note="2'-OMe-nucleotide"
  modified_base 16..16: /mod_base="OTHER" /note="2'-OMe-nucleotide"
  modified_base 17..17: /mod_base="OTHER" /note="2'-OMe-nucleotide"
  modified_base 18..18: /mod_base="OTHER" /note="2'-OMe-nucleotide"
  modified_base 19..19: /mod_base="OTHER" /note="2'-OMe-nucleotide"
  modified_base 20..20: /mod_base="OTHER" /note="2'-OMe-nucleotide"
  modified_base 21..21: /mod_base="OTHER" /note="Cyclohexane-morpholino-thymidine analog 4"
  modified_base 22..22: /mod_base="OTHER" /note="Cyclohexane-morpholino-thymidine analog 4"
tttauugaucaagacaauuctt

SEQ ID NO: 996 - DNA, 22 bp, Artificial Sequence
  Description of Artificial Sequence: Synthetic oligonucleotide
  Description of Combined DNA/RNA Molecule: Synthetic oligonucleotide
  N-term hydroxyl group
  C-term hydroxyl group
  modified_base 1..1: /mod_base="OTHER" /note="GalNAc-morpholino-thymidine analog 7"
  modified_base 2..2: /mod_base="OTHER" /note="GalNAc-morpholino-thymidine analog 7"
  modified_base 3..3: /mod_base="OTHER" /note="GalNAc-morpholino-thymidine analog 7"
  modified_base 4..4: /mod_base="OTHER" /note="Locked nucleic acid (LNA) nucleotide"
  modified_base 5..5: /mod_base="OTHER" /note="Locked nucleic acid (LNA) nucleotide"
  modified_base 6..6: /mod_base="OTHER" /note="2'-OMe-nucleotide"
  modified_base 7..7: /mod_base="OTHER" /note="2'-OMe-nucleotide"
  modified_base 8..8: /mod_base="OTHER" /note="2'-fluoro-nucleotide"
  modified_base 9..9: /mod_base="OTHER" /note="2'-OMe-nucleotide"
  modified_base 10..10: /mod_base="OTHER" /note="2'-fluoro-nucleotide"
  modified_base 11..11: /mod_base="OTHER" /note="2'-OMe-nucleotide"
  modified_base 12..12: /mod_base="OTHER" /note="2'-fluoro-nucleotide"
  modified_base 13..13: /mod_base="OTHER" /note="2'-fluoro-nucleotide"
  modified_base 14..14: /mod_base="OTHER" /note="2'-fluoro-nucleotide"
  modified_base 15..15: /mod_base="OTHER" /note="2'-OMe-nucleotide"
  modified_base 16..16: /mod_base="OTHER" /note="2'-OMe-nucleotide"
  modified_base 17..17: /mod_base="OTHER" /note="2'-OMe-nucleotide"
  modified_base 18..18: /mod_base="OTHER" /note="2'-OMe-nucleotide"
  modified_base 19..19: /mod_base="OTHER" /note="2'-OMe-nucleotide"
  modified_base 20..20: /mod_base="OTHER" /note="2'-OMe-nucleotide"
  modified_base 21..21: /mod_base="OTHER" /note="Cyclohexane-morpholino-thymidine analog 4"
  modified_base 22..22: /mod_base="OTHER" /note="Cyclohexane-morpholino-thymidine analog 4"
tttauugaucaagacaauuctt

SEQ ID NO: 997 - DNA, 22 bp, Artificial Sequence
  Description of Artificial Sequence: Synthetic oligonucleotide
  Description of Combined DNA/RNA Molecule: Synthetic oligonucleotide
  N-term hydroxyl group
  C-term hydroxyl group
  modified_base 1..1: /mod_base="OTHER" /note="GalNAc-morpholino-thymidine analog 7"
  modified_base 2..2: /mod_base="OTHER" /note="GalNAc-morpholino-thymidine analog 7"
  modified_base 3..3: /mod_base="OTHER" /note="GalNAc-morpholino-thymidine analog 7"
  modified_base 4..4: /mod_base="OTHER" /note="Locked nucleic acid (LNA) nucleotide"
  modified_base 5..5: /mod_base="OTHER" /note="Locked nucleic acid (LNA) nucleotide"
  modified_base 6..6: /mod_base="OTHER" /note="2'-OMe-nucleotide"
  modified_base 7..7: /mod_base="OTHER" /note="2'-OMe-nucleotide"
  modified_base 8..8: /mod_base="OTHER" /note="2'-fluoro-nucleotide"
  modified_base 9..9: /mod_base="OTHER" /note="2'-OMe-nucleotide"
  modified_base 10..10: /mod_base="OTHER" /note="2'-fluoro-nucleotide"
  modified_base 11..11: /mod_base="OTHER" /note="2'-OMe-nucleotide"
  modified_base 12..12: /mod_base="OTHER" /note="2'-fluoro-nucleotide"
  modified_base 13..13: /mod_base="OTHER" /note="2'-fluoro-nucleotide"
  modified_base 14..14: /mod_base="OTHER" /note="2'-fluoro-nucleotide"
  modified_base 15..15: /mod_base="OTHER" /note="2'-OMe-nucleotide"
  modified_base 16..16: /mod_base="OTHER" /note="2'-OMe-nucleotide"
  modified_base 17..17: /mod_base="OTHER" /note="2'-OMe-nucleotide"
  modified_base 18..18: /mod_base="OTHER" /note="2'-OMe-nucleotide"
  modified_base 19..19: /mod_base="OTHER" /note="2'-OMe-nucleotide"
  modified_base 20..20: /mod_base="OTHER" /note="2'-OMe-nucleotide"
  modified_base 21..21: /mod_base="OTHER" /note="Cyclohexane-morpholino-thymidine analog 4"
  modified_base 22..22: /mod_base="OTHER" /note="Cyclohexane-morpholino-thymidine analog 4"
tttauugaucaagacaauuctt

SEQ ID NO: 998 - DNA, 22 bp, Artificial Sequence
  Description of Artificial Sequence: Synthetic oligonucleotide
  Description of Combined DNA/RNA Molecule: Synthetic oligonucleotide
  N-term hydroxyl group
  C-term hydroxyl group
  modified_base 1..1: /mod_base="OTHER" /note="GalNAc-morpholino-thymidine analog 7"
  modified_base 2..2: /mod_base="OTHER" /note="GalNAc-morpholino-thymidine analog 7"
  modified_base 3..3: /mod_base="OTHER" /note="GalNAc-morpholino-thymidine analog 7"
  modified_base 4..4: /mod_base="OTHER" /note="Locked nucleic acid (LNA) nucleotide"
  modified_base 5..5: /mod_base="OTHER" /note="Locked nucleic acid (LNA) nucleotide"
  modified_base 6..6: /mod_base="OTHER" /note="2'-OMe-nucleotide"
  modified_base 7..7: /mod_base="OTHER" /note="2'-OMe-nucleotide"
  modified_base 8..8: /mod_base="OTHER" /note="2'-fluoro-nucleotide"
  modified_base 9..9: /mod_base="OTHER" /note="2'-OMe-nucleotide"
  modified_base 10..10: /mod_base="OTHER" /note="2'-fluoro-nucleotide"
  modified_base 11..11: /mod_base="OTHER" /note="2'-OMe-nucleotide"
  modified_base 12..12: /mod_base="OTHER" /note="2'-fluoro-nucleotide"
  modified_base 13..13: /mod_base="OTHER" /note="2'-fluoro-nucleotide"
  modified_base 14..14: /mod_base="OTHER" /note="2'-fluoro-nucleotide"
  modified_base 15..15: /mod_base="OTHER" /note="2'-OMe-nucleotide"
  modified_base 16..16: /mod_base="OTHER" /note="2'-OMe-nucleotide"
  modified_base 17..17: /mod_base="OTHER" /note="2'-OMe-nucleotide"
  modified_base 18..18: /mod_base="OTHER" /note="2'-OMe-nucleotide"
  modified_base 19..19: /mod_base="OTHER" /note="2'-OMe-nucleotide"
  modified_base 20..20: /mod_base="OTHER" /note="2'-OMe-nucleotide"
  modified_base 21..21: /mod_base="OTHER" /note="Cyclohexane-morpholino-thymidine analog 4"
  modified_base 22..22: /mod_base="OTHER" /note="Cyclohexane-morpholino-thymidine analog 4"
tttauugaucaagacaauuctt

SEQ ID NO: 999 - DNA, 22 bp, Artificial Sequence
  Description of Artificial Sequence: Synthetic oligonucleotide
  Description of Combined DNA/RNA Molecule: Synthetic oligonucleotide
  N-term hydroxyl group
  C-term hydroxyl group
  modified_base 1..1: /mod_base="OTHER" /note="GalNAc-morpholino-thymidine analog 7"
  modified_base 2..2: /mod_base="OTHER" /note="GalNAc-morpholino-thymidine analog 7"
  modified_base 3..3: /mod_base="OTHER" /note="GalNAc-morpholino-thymidine analog 7"
  modified_base 4..4: /mod_base="OTHER" /note="Locked nucleic acid (LNA) nucleotide"
  modified_base 5..5: /mod_base="OTHER" /note="Locked nucleic acid (LNA) nucleotide"
  modified_base 6..6: /mod_base="OTHER" /note="2'-OMe-nucleotide"
  modified_base 7..7: /mod_base="OTHER" /note="2'-OMe-nucleotide"
  modified_base 8..8: /mod_base="OTHER" /note="2'-fluoro-nucleotide"
  modified_base 9..9: /mod_base="OTHER" /note="2'-OMe-nucleotide"
  modified_base 10..10: /mod_base="OTHER" /note="2'-fluoro-nucleotide"
  modified_base 11..11: /mod_base="OTHER" /note="2'-OMe-nucleotide"
  modified_base 12..12: /mod_base="OTHER" /note="2'-fluoro-nucleotide"
  modified_base 13..13: /mod_base="OTHER" /note="2'-fluoro-nucleotide"
  modified_base 14..14: /mod_base="OTHER" /note="2'-fluoro-nucleotide"
  modified_base 15..15: /mod_base="OTHER" /note="2'-OMe-nucleotide"
  modified_base 16..16: /mod_base="OTHER" /note="2'-OMe-nucleotide"
  modified_base 17..17: /mod_base="OTHER" /note="2'-OMe-nucleotide"
  modified_base 18..18: /mod_base="OTHER" /note="2'-OMe-nucleotide"
  modified_base 19..19: /mod_base="OTHER" /note="2'-OMe-nucleotide"
  modified_base 20..20: /mod_base="OTHER" /note="2'-OMe-nucleotide"
  modified_base 21..21: /mod_base="OTHER" /note="Cyclohexane-morpholino-thymidine analog 4"
  modified_base 22..22: /mod_base="OTHER" /note="Cyclohexane-morpholino-thymidine analog 4"
tttauugaucaagacaauuctt

SEQ ID NO: 1000 - DNA, 22 bp, Artificial Sequence
  Description of Artificial Sequence: Synthetic oligonucleotide
  Description of Combined DNA/RNA Molecule: Synthetic oligonucleotide
  N-term hydroxyl group
  C-term hydroxyl group
  modified_base 1..1: /mod_base="OTHER" /note="GalNAc-morpholino-thymidine analog 7"
  modified_base 2..2: /mod_base="OTHER" /note="GalNAc-morpholino-thymidine analog 7"
  modified_base 3..3: /mod_base="OTHER" /note="GalNAc-morpholino-thymidine analog 7"
  modified_base 4..4: /mod_base="OTHER" /note="Locked nucleic acid (LNA) nucleotide"
  modified_base 5..5: /mod_base="OTHER" /note="Locked nucleic acid (LNA) nucleotide"
  modified_base 6..6: /mod_base="OTHER" /note="2'-OMe-nucleotide"
  modified_base 7..7: /mod_base="OTHER" /note="2'-OMe-nucleotide"
  modified_base 8..8: /mod_base="OTHER" /note="2'-fluoro-nucleotide"
  modified_base 9..9: /mod_base="OTHER" /note="2'-OMe-nucleotide"
  modified_base 10..10: /mod_base="OTHER" /note="2'-fluoro-nucleotide"
  modified_base 11..11: /mod_base="OTHER" /note="2'-OMe-nucleotide"
  modified_base 12..12: /mod_base="OTHER" /note="2'-fluoro-nucleotide"
  modified_base 13..13: /mod_base="OTHER" /note="2'-fluoro-nucleotide"
  modified_base 14..14: /mod_base="OTHER" /note="2'-fluoro-nucleotide"
  modified_base 15..15: /mod_base="OTHER" /note="2'-OMe-nucleotide"
  modified_base 16..16: /mod_base="OTHER" /note="2'-OMe-nucleotide"
  modified_base 17..17: /mod_base="OTHER" /note="2'-OMe-nucleotide"
  modified_base 18..18: /mod_base="OTHER" /note="2'-OMe-nucleotide"
  modified_base 19..19: /mod_base="OTHER" /note="2'-OMe-nucleotide"
  modified_base 20..20: /mod_base="OTHER" /note="2'-OMe-nucleotide"
  modified_base 21..21: /mod_base="OTHER" /note="Cyclohexane-morpholino-thymidine analog 4"
  modified_base 22..22: /mod_base="OTHER" /note="Cyclohexane-morpholino-thymidine analog 4"
tttauugaucaagacaauuctt

SEQ ID NO: 1001 - DNA, 24 bp, Artificial Sequence
  Description of Artificial Sequence: Synthetic oligonucleotide
  Description of Combined DNA/RNA Molecule: Synthetic oligonucleotide
  N-term hydroxyl group
  C-term hydroxyl group
  modified_base 1..1: /mod_base="OTHER" /note="GalNAc-morpholino-thymidine analog 7"
  modified_base 2..2: /mod_base="OTHER" /note="GalNAc-morpholino-thymidine analog 7"
  modified_base 3..3: /mod_base="OTHER" /note="GalNAc-morpholino-thymidine analog 7"
  modified_base 4..4: /mod_base="OTHER" /note="2'-OMe-nucleotide"
  modified_base 5..5: /mod_base="OTHER" /note="2'-OMe-nucleotide"
  modified_base 6..6: /mod_base="OTHER" /note="2'-OMe-nucleotide"
  modified_base 7..7: /mod_base="OTHER" /note="2'-OMe-nucleotide"
  modified_base 8..8: /mod_base="OTHER" /note="2'-fluoro-nucleotide"
  modified_base 9..9: /mod_base="OTHER" /note="2'-OMe-nucleotide"
  modified_base 10..10: /mod_base="OTHER" /note="2'-fluoro-nucleotide"
  modified_base 11..11: /mod_base="OTHER" /note="2'-fluoro-nucleotide"
  modified_base 12..12: /mod_base="OTHER" /note="2'-fluoro-nucleotide"
  modified_base 13..13: /mod_base="OTHER" /note="2'-OMe-nucleotide"
  modified_base 14..14: /mod_base="OTHER" /note="2'-OMe-nucleotide"
  modified_base 15..15: /mod_base="OTHER" /note="2'-OMe-nucleotide"
  modified_base 16..16: /mod_base="OTHER" /note="2'-OMe-nucleotide"
  modified_base 17..17: /mod_base="OTHER" /note="2'-OMe-nucleotide"
  modified_base 18..18: /mod_base="OTHER" /note="2'-OMe-nucleotide"
  modified_base 19..19: /mod_base="OTHER" /note="2'-OMe-nucleotide"
  modified_base 20..20: /mod_base="OTHER" /note="2'-OMe-nucleotide"
  modified_base 21..21: /mod_base="OTHER" /note="2'-OMe-nucleotide"
  modified_base 22..22: /mod_base="OTHER" /note="2'-OMe-nucleotide"
  modified_base 23..23: /mod_base="OTHER" /note="Cyclohexane-morpholino-thymidine analog 4"
  modified_base 24..24: /mod_base="OTHER" /note="Cyclohexane-morpholino-thymidine analog 4"
tttauugaucaagacaauucautt

SEQ ID NO: 1002 - DNA, 24 bp, Artificial Sequence
  Description of Artificial Sequence: Synthetic oligonucleotide
  Description of Combined DNA/RNA Molecule: Synthetic oligonucleotide
  N-term hydroxyl group
  C-term hydroxyl group
  modified_base 1..1: /mod_base="OTHER" /note="GalNAc-morpholino-thymidine analog 7"
  modified_base 2..2: /mod_base="OTHER" /note="GalNAc-morpholino-thymidine analog 7"
  modified_base 3..3: /mod_base="OTHER" /note="GalNAc-morpholino-thymidine analog 7"
  modified_base 4..4: /mod_base="OTHER" /note="2'-OMe-nucleotide"
  modified_base 5..5: /mod_base="OTHER" /note="2'-OMe-nucleotide"
  modified_base 6..6: /mod_base="OTHER" /note="2'-OMe-nucleotide"
  modified_base 7..7: /mod_base="OTHER" /note="2'-OMe-nucleotide"
  modified_base 8..8: /mod_base="OTHER" /note="2'-fluoro-nucleotide"
  modified_base 9..9: /mod_base="OTHER" /note="2'-OMe-nucleotide"
  modified_base 10..10: /mod_base="OTHER" /note="2'-fluoro-nucleotide"
  modified_base 11..11: /mod_base="OTHER" /note="2'-fluoro-nucleotide"
  modified_base 12..12: /mod_base="OTHER" /note="2'-fluoro-nucleotide"
  modified_base 13..13: /mod_base="OTHER" /note="2'-OMe-nucleotide"
  modified_base 14..14: /mod_base="OTHER" /note="2'-OMe-nucleotide"
  modified_base 15..15: /mod_base="OTHER" /note="2'-OMe-nucleotide"
  modified_base 16..16: /mod_base="OTHER" /note="2'-OMe-nucleotide"
  modified_base 17..17: /mod_base="OTHER" /note="2'-OMe-nucleotide"
  modified_base 18..18: /mod_base="OTHER" /note="2'-OMe-nucleotide"
  modified_base 19..19: /mod_base="OTHER" /note="2'-OMe-nucleotide"
  modified_base 20..20: /mod_base="OTHER" /note="2'-OMe-nucleotide"
  modified_base 21..21: /mod_base="OTHER" /note="2'-OMe-nucleotide"
  modified_base 22..22: /mod_base="OTHER" /note="2'-OMe-nucleotide"
  modified_base 23..23: /mod_base="OTHER" /note="Cyclohexane-morpholino-thymidine analog 4"
  modified_base 24..24: /mod_base="OTHER" /note="Cyclohexane-morpholino-thymidine analog 4"
tttauugaucaagacaauucautt

SEQ ID NO: 1003 - DNA, 24 bp, Artificial Sequence
  Description of Artificial Sequence: Synthetic oligonucleotide
  Description of Combined DNA/RNA Molecule: Synthetic oligonucleotide
  N-term hydroxyl group
  C-term hydroxyl group
  modified_base 1..1: /mod_base="OTHER" /note="GalNAc-morpholino-thymidine analog 7"
  modified_base 2..2: /mod_base="OTHER" /note="GalNAc-morpholino-thymidine analog 7"
  modified_base 3..3: /mod_base="OTHER" /note="GalNAc-morpholino-thymidine analog 7"
  modified_base 4..4: /mod_base="OTHER" /note="2'-OMe-nucleotide"
  modified_base 5..5: /mod_base="OTHER" /note="2'-OMe-nucleotide"
  modified_base 6..6: /mod_base="OTHER" /note="2'-OMe-nucleotide"
  modified_base 7..7: /mod_base="OTHER" /note="2'-OMe-nucleotide"
  modified_base 8..8: /mod_base="OTHER" /note="2'-fluoro-nucleotide"
  modified_base 9..9: /mod_base="OTHER" /note="2'-OMe-nucleotide"
  modified_base 10..10: /mod_base="OTHER" /note="2'-fluoro-nucleotide"
  modified_base 11..11: /mod_base="OTHER" /note="2'-fluoro-nucleotide"
  modified_base 12..12: /mod_base="OTHER" /note="2'-fluoro-nucleotide"
  modified_base 13..13: /mod_base="OTHER" /note="2'-OMe-nucleotide"
  modified_base 14..14: /mod_base="OTHER" /note="2'-OMe-nucleotide"
  modified_base 15..15: /mod_base="OTHER" /note="2'-OMe-nucleotide"
  modified_base 16..16: /mod_base="OTHER" /note="2'-OMe-nucleotide"
  modified_base 17..17: /mod_base="OTHER" /note="2'-OMe-nucleotide"
  modified_base 18..18: /mod_base="OTHER" /note="2'-OMe-nucleotide"
  modified_base 19..19: /mod_base="OTHER" /note="2'-OMe-nucleotide"
  modified_base 20..20: /mod_base="OTHER" /note="2'-OMe-nucleotide"
  modified_base 21..21: /mod_base="OTHER" /note="2'-OMe-nucleotide"
  modified_base 22..22: /mod_base="OTHER" /note="2'-OMe-nucleotide"
  modified_base 23..23: /mod_base="OTHER" /note="Cyclohexane-morpholino-thymidine analog 4"
  modified_base 24..24: /mod_base="OTHER" /note="Cyclohexane-morpholino-thymidine analog 4"
tttauugaucaagacaauucautt

SEQ ID NO: 1004 - DNA, 24 bp, Artificial Sequence
  Description of Artificial Sequence: Synthetic oligonucleotide
  Description of Combined DNA/RNA Molecule: Synthetic oligonucleotide
  N-term hydroxyl group
  C-term hydroxyl group
  modified_base 1..1: /mod_base="OTHER" /note="GalNAc-morpholino-thymidine analog 7"
  modified_base 2..2: /mod_base="OTHER" /note="GalNAc-morpholino-thymidine analog 7"
  modified_base 3..3: /mod_base="OTHER" /note="GalNAc-morpholino-thymidine analog 7"
  modified_base 4..4: /mod_base="OTHER" /note="2'-OMe-nucleotide"
  modified_base 5..5: /mod_base="OTHER" /note="2'-OMe-nucleotide"
  modified_base 6..6: /mod_base="OTHER" /note="2'-OMe-nucleotide"
  modified_base 7..7: /mod_base="OTHER" /note="2'-OMe-nucleotide"
  modified_base 8..8: /mod_base="OTHER" /note="2'-fluoro-nucleotide"
  modified_base 9..9: /mod_base="OTHER" /note="2'-OMe-nucleotide"
  modified_base 10..10: /mod_base="OTHER" /note="2'-fluoro-nucleotide"
  modified_base 11..11: /mod_base="OTHER" /note="2'-fluoro-nucleotide"
  modified_base 12..12: /mod_base="OTHER" /note="2'-fluoro-nucleotide"
  modified_base 13..13: /mod_base="OTHER" /note="2'-OMe-nucleotide"
  modified_base 14..14: /mod_base="OTHER" /note="2'-OMe-nucleotide"
  modified_base 15..15: /mod_base="OTHER" /note="2'-OMe-nucleotide"
  modified_base 16..16: /mod_base="OTHER" /note="2'-OMe-nucleotide"
  modified_base 17..17: /mod_base="OTHER" /note="2'-OMe-nucleotide"
  modified_base 18..18: /mod_base="OTHER" /note="2'-OMe-nucleotide"
  modified_base 19..19: /mod_base="OTHER" /note="2'-OMe-nucleotide"
  modified_base 20..20: /mod_base="OTHER" /note="2'-OMe-nucleotide"
  modified_base 21..21: /mod_base="OTHER" /note="2'-OMe-nucleotide"
  modified_base 22..22: /mod_base="OTHER" /note="2'-OMe-nucleotide"
  modified_base 23..23: /mod_base="OTHER" /note="Cyclohexane-morpholino-thymidine analog 4"
  modified_base 24..24: /mod_base="OTHER" /note="Cyclohexane-morpholino-thymidine analog 4"
tttauugaucaagacaauucautt

SEQ ID NO: 1005 - DNA, 24 bp, Artificial Sequence
  Description of Artificial Sequence: Synthetic oligonucleotide
  Description of Combined DNA/RNA Molecule: Synthetic oligonucleotide
  N-term hydroxyl group
  C-term hydroxyl group
  modified_base 1..1: /mod_base="OTHER" /note="GalNAc-morpholino-thymidine analog 7"
  modified_base 2..2: /mod_base="OTHER" /note="GalNAc-morpholino-thymidine analog 7"
  modified_base 3..3: /mod_base="OTHER" /note="GalNAc-morpholino-thymidine analog 7"
  modified_base 4..4: /mod_base="OTHER" /note="Locked nucleic acid (LNA) nucleotide"
  modified_base 5..5: /mod_base="OTHER" /note="Locked nucleic acid (LNA) nucleotide"
  modified_base 6..6: /mod_base="OTHER" /note="2'-OMe-nucleotide"
  modified_base 7..7: /mod_base="OTHER" /note="2'-OMe-nucleotide"
  modified_base 8..8: /mod_base="OTHER" /note="2'-fluoro-nucleotide"
  modified_base 9..9: /mod_base="OTHER" /note="2'-OMe-nucleotide"
  modified_base 10..10: /mod_base="OTHER" /note="2'-fluoro-nucleotide"
  modified_base 11..11: /mod_base="OTHER" /note="2'-fluoro-nucleotide"
  modified_base 12..12: /mod_base="OTHER" /note="2'-fluoro-nucleotide"
  modified_base 13..13: /mod_base="OTHER" /note="2'-OMe-nucleotide"
  modified_base 14..14: /mod_base="OTHER" /note="2'-OMe-nucleotide"
  modified_base 15..15: /mod_base="OTHER" /note="2'-OMe-nucleotide"
  modified_base 16..16: /mod_base="OTHER" /note="2'-OMe-nucleotide"
  modified_base 17..17: /mod_base="OTHER" /note="2'-OMe-nucleotide"
  modified_base 18..18: /mod_base="OTHER" /note="2'-OMe-nucleotide"
  modified_base 19..19: /mod_base="OTHER" /note="2'-OMe-nucleotide"
  modified_base 20..20: /mod_base="OTHER" /note="2'-OMe-nucleotide"
  modified_base 21..21: /mod_base="OTHER" /note="2'-OMe-nucleotide"
  modified_base 22..22: /mod_base="OTHER" /note="2'-OMe-nucleotide"
  modified_base 23..23: /mod_base="OTHER" /note="Cyclohexane-morpholino-thymidine analog 4"
  modified_base 24..24: /mod_base="OTHER" /note="Cyclohexane-morpholino-thymidine analog 4"
tttauugaucaagacaauucautt

SEQ ID NO: 1006 - DNA, 24 bp, Artificial Sequence
  Description of Artificial Sequence: Synthetic oligonucleotide
  Description of Combined DNA/RNA Molecule: Synthetic oligonucleotide
  N-term hydroxyl group
  C-term hydroxyl group
  modified_base 1..1: /mod_base="OTHER" /note="GalNAc-morpholino-thymidine analog 7"
  modified_base 2..2: /mod_base="OTHER" /note="GalNAc-morpholino-thymidine analog 7"
  modified_base 3..3: /mod_base="OTHER" /note="GalNAc-morpholino-thymidine analog 7"
  modified_base 4..4: /mod_base="OTHER" /note="Locked nucleic acid (LNA) nucleotide"
  modified_base 5..5: /mod_base="OTHER" /note="Locked nucleic acid (LNA) nucleotide"
  modified_base 6..6: /mod_base="OTHER" /note="2'-OMe-nucleotide"
  modified_base 7..7: /mod_base="OTHER" /note="2'-OMe-nucleotide"
  modified_base 8..8: /mod_base="OTHER" /note="2'-fluoro-nucleotide"
  modified_base 9..9: /mod_base="OTHER" /note="2'-OMe-nucleotide"
  modified_base 10..10: /mod_base="OTHER" /note="2'-fluoro-nucleotide"
  modified_base 11..11: /mod_base="OTHER" /note="2'-fluoro-nucleotide"
  modified_base 12..12: /mod_base="OTHER" /note="2'-fluoro-nucleotide"
  modified_base 13..13: /mod_base="OTHER" /note="2'-OMe-nucleotide"
  modified_base 14..14: /mod_base="OTHER" /note="2'-OMe-nucleotide"
  modified_base 15..15: /mod_base="OTHER" /note="2'-OMe-nucleotide"
  modified_base 16..16: /mod_base="OTHER" /note="2'-OMe-nucleotide"
  modified_base 17..17: /mod_base="OTHER" /note="2'-OMe-nucleotide"
  modified_base 18..18: /mod_base="OTHER" /note="2'-OMe-nucleotide"
  modified_base 19..19: /mod_base="OTHER" /note="2'-OMe-nucleotide"
  modified_base 20..20: /mod_base="OTHER" /note="2'-OMe-nucleotide"
  modified_base 21..21: /mod_base="OTHER" /note="2'-OMe-nucleotide"
  modified_base 22..22: /mod_base="OTHER" /note="2'-OMe-nucleotide"
  modified_base 23..23: /mod_base="OTHER" /note="Cyclohexane-morpholino-thymidine analog 4"
  modified_base 24..24: /mod_base="OTHER" /note="Cyclohexane-morpholino-thymidine analog 4"
tttauugaucaagacaauucautt

SEQ ID NO: 1007 - DNA, 24 bp, Artificial Sequence
  Description of Artificial Sequence: Synthetic oligonucleotide
  Description of Combined DNA/RNA Molecule: Synthetic oligonucleotide
  N-term hydroxyl group
  C-term hydroxyl group
  modified_base 1..1: /mod_base="OTHER" /note="GalNAc-morpholino-thymidine analog 7"
  modified_base 2..2: /mod_base="OTHER" /note="GalNAc-morpholino-thymidine analog 7"
  modified_base 3..3: /mod_base="OTHER" /note="GalNAc-morpholino-thymidine analog 7"
  modified_base 4..4: /mod_base="OTHER" /note="Locked nucleic acid (LNA) nucleotide"
  modified_base 5..5: /mod_base="OTHER" /note="Locked nucleic acid (LNA) nucleotide"
  modified_base 6..6: /mod_base="OTHER" /note="2'-OMe-nucleotide"
  modified_base 7..7: /mod_base="OTHER" /note="2'-OMe-nucleotide"
  modified_base 8..8: /mod_base="OTHER" /note="2'-fluoro-nucleotide"
  modified_base 9..9: /mod_base="OTHER" /note="2'-OMe-nucleotide"
  modified_base 10..10: /mod_base="OTHER" /note="2'-fluoro-nucleotide"
  modified_base 11..11: /mod_base="OTHER" /note="2'-fluoro-nucleotide"
  modified_base 12..12: /mod_base="OTHER" /note="2'-fluoro-nucleotide"
  modified_base 13..13: /mod_base="OTHER" /note="2'-OMe-nucleotide"
  modified_base 14..14: /mod_base="OTHER" /note="2'-OMe-nucleotide"
  modified_base 15..15: /mod_base="OTHER" /note="2'-OMe-nucleotide"
  modified_base 16..16: /mod_base="OTHER" /note="2'-OMe-nucleotide"
  modified_base 17..17: /mod_base="OTHER" /note="2'-OMe-nucleotide"
  modified_base 18..18: /mod_base="OTHER" /note="2'-OMe-nucleotide"
  modified_base 19..19: /mod_base="OTHER" /note="2'-OMe-nucleotide"
  modified_base 20..20: /mod_base="OTHER" /note="2'-OMe-nucleotide"
  modified_base 21..21: /mod_base="OTHER" /note="2'-OMe-nucleotide"
  modified_base 22..22: /mod_base="OTHER" /note="2'-OMe-nucleotide"
  modified_base 23..23: /mod_base="OTHER" /note="Cyclohexane-morpholino-thymidine analog 4"
  modified_base 24..24: /mod_base="OTHER" /note="Cyclohexane-morpholino-thymidine analog 4"
tttauugaucaagacaauucautt

SEQ ID NO: 1008 - DNA, 24 bp, Artificial Sequence
  Description of Artificial Sequence: Synthetic oligonucleotide
  Description of Combined DNA/RNA Molecule: Synthetic oligonucleotide
  N-term hydroxyl group
  C-term hydroxyl group
  modified_base 1..1: /mod_base="OTHER" /note="GalNAc-morpholino-thymidine analog 7"
  modified_base 2..2: /mod_base="OTHER" /note="GalNAc-morpholino-thymidine analog 7"
  modified_base 3..3: /mod_base="OTHER" /note="GalNAc-morpholino-thymidine analog 7"
  modified_base 4..4: /mod_base="OTHER" /note="Locked nucleic acid (LNA) nucleotide"
  modified_base 5..5: /mod_base="OTHER" /note="Locked nucleic acid (LNA) nucleotide"
  modified_base 6..6: /mod_base="OTHER" /note="2'-OMe-nucleotide"
  modified_base 7..7: /mod_base="OTHER" /note="2'-OMe-nucleotide"
  modified_base 8..8: /mod_base="OTHER" /note="2'-fluoro-nucleotide"
  modified_base 9..9: /mod_base="OTHER" /note="2'-OMe-nucleotide"
  modified_base 10..10: /mod_base="OTHER" /note="2'-fluoro-nucleotide"
  modified_base 11..11: /mod_base="OTHER" /note="2'-fluoro-nucleotide"
  modified_base 12..12: /mod_base="OTHER" /note="2'-fluoro-nucleotide"
  modified_base 13..13: /mod_base="OTHER" /note="2'-OMe-nucleotide"
  modified_base 14..14: /mod_base="OTHER" /note="2'-OMe-nucleotide"
  modified_base 15..15: /mod_base="OTHER" /note="2'-OMe-nucleotide"
  modified_base 16..16: /mod_base="OTHER" /note="2'-OMe-nucleotide"
  modified_base 17..17: /mod_base="OTHER" /note="2'-OMe-nucleotide"
  modified_base 18..18: /mod_base="OTHER" /note="2'-OMe-nucleotide"
  modified_base 19..19: /mod_base="OTHER" /note="2'-OMe-nucleotide"
  modified_base 20..20: /mod_base="OTHER" /note="2'-OMe-nucleotide"
  modified_base 21..21: /mod_base="OTHER" /note="2'-OMe-nucleotide"
  modified_base 22..22: /mod_base="OTHER" /note="2'-OMe-nucleotide"
  modified_base 23..23: /mod_base="OTHER" /note="Cyclohexane-morpholino-thymidine analog 4"
  modified_base 24..24: /mod_base="OTHER" /note="Cyclohexane-morpholino-thymidine analog 4"
tttauugaucaagacaauucautt

SEQ ID NO: 1009 - DNA, 24 bp, Artificial Sequence
  Description of Artificial Sequence: Synthetic oligonucleotide
  Description of Combined DNA/RNA Molecule: Synthetic oligonucleotide
  N-term hydroxyl group
  C-term hydroxyl group
  modified_base 1..1: /mod_base="OTHER" /note="GalNAc-morpholino-thymidine analog 7"
  modified_base 2..2: /mod_base="OTHER" /note="GalNAc-morpholino-thymidine analog 7"
  modified_base 3..3: /mod_base="OTHER" /note="GalNAc-morpholino-thymidine analog 7"
  modified_base 4..4: /mod_base="OTHER" /note="2'-OMe-nucleotide"
  modified_base 5..5: /mod_base="OTHER" /note="2'-OMe-nucleotide"
  modified_base 6..6: /mod_base="OTHER" /note="2'-OMe-nucleotide"
  modified_base 7..7: /mod_base="OTHER" /note="2'-OMe-nucleotide"
  modified_base 8..8: /mod_base="OTHER" /note="2'-fluoro-nucleotide"
  modified_base 9..9: /mod_base="OTHER" /note="2'-OMe-nucleotide"
  modified_base 10..10: /mod_base="OTHER" /note="2'-fluoro-nucleotide"
  modified_base 11..11: /mod_base="OTHER" /note="2'-OMe-nucleotide"
  modified_base 12..12: /mod_base="OTHER" /note="2'-fluoro-nucleotide"
  modified_base 13..13: /mod_base="OTHER" /note="2'-fluoro-nucleotide"
  modified_base 14..14: /mod_base="OTHER" /note="2'-fluoro-nucleotide"
  modified_base 15..15: /mod_base="OTHER" /note="2'-OMe-nucleotide"
  modified_base 16..16: /mod_base="OTHER" /note="2'-OMe-nucleotide"
  modified_base 17..17: /mod_base="OTHER" /note="2'-OMe-nucleotide"
  modified_base 18..18: /mod_base="OTHER" /note="2'-OMe-nucleotide"
  modified_base 19..19: /mod_base="OTHER" /note="2'-OMe-nucleotide"
  modified_base 20..20: /mod_base="OTHER" /note="2'-OMe-nucleotide"
  modified_base 21..21: /mod_base="OTHER" /note="2'-OMe-nucleotide"
  modified_base 22..22: /mod_base="OTHER" /note="2'-OMe-nucleotide"
  modified_base 23..23: /mod_base="OTHER" /note="Cyclohexane-morpholino-thymidine analog 4"
  modified_base 24..24: /mod_base="OTHER" /note="Cyclohexane-morpholino-thymidine analog 4"
tttauugaucaagacaauucautt

SEQ ID NO: 1010 - DNA, 24 bp, Artificial Sequence
  Description of Artificial Sequence: Synthetic oligonucleotide
  Description of Combined DNA/RNA Molecule: Synthetic oligonucleotide
  N-term hydroxyl group
  C-term hydroxyl group
  modified_base 1..1: /mod_base="OTHER" /note="GalNAc-morpholino-thymidine analog 7"
  modified_base 2..2: /mod_base="OTHER" /note="GalNAc-morpholino-thymidine analog 7"
  modified_base 3..3: /mod_base="OTHER" /note="GalNAc-morpholino-thymidine analog 7"
  modified_base 4..4: /mod_base="OTHER" /note="2'-OMe-nucleotide"
  modified_base 5..5: /mod_base="OTHER" /note="2'-OMe-nucleotide"
  modified_base 6..6: /mod_base="OTHER" /note="2'-OMe-nucleotide"
  modified_base 7..7: /mod_base="OTHER" /note="2'-OMe-nucleotide"
  modified_base 8..8: /mod_base="OTHER" /note="2'-fluoro-nucleotide"
  modified_base 9..9: /mod_base="OTHER" /note="2'-OMe-nucleotide"
  modified_base 10..10: /mod_base="OTHER" /note="2'-fluoro-nucleotide"
  modified_base 11..11: /mod_base="OTHER" /note="2'-OMe-nucleotide"
  modified_base 12..12: /mod_base="OTHER" /note="2'-fluoro-nucleotide"
  modified_base 13..13: /mod_base="OTHER" /note="2'-fluoro-nucleotide"
  modified_base 14..14: /mod_base="OTHER" /note="2'-fluoro-nucleotide"
  modified_base 15..15: /mod_base="OTHER" /note="2'-OMe-nucleotide"
  modified_base 16..16: /mod_base="OTHER" /note="2'-OMe-nucleotide"
  modified_base 17..17: /mod_base="OTHER" /note="2'-OMe-nucleotide"
  modified_base 18..18: /mod_base="OTHER" /note="2'-OMe-nucleotide"
  modified_base 19..19: /mod_base="OTHER" /note="2'-OMe-nucleotide"
  modified_base 20..20: /mod_base="OTHER" /note="2'-OMe-nucleotide"
  modified_base 21..21: /mod_base="OTHER" /note="2'-OMe-nucleotide"
  modified_base 22..22: /mod_base="OTHER" /note="2'-OMe-nucleotide"
  modified_base 23..23: /mod_base="OTHER" /note="Cyclohexane-morpholino-thymidine analog 4"
  modified_base 24..24: /mod_base="OTHER" /note="Cyclohexane-morpholino-thymidine analog 4"
tttauugaucaagacaauucautt

SEQ ID NO: 1011 - DNA, 24 bp, Artificial Sequence
  Description of Artificial Sequence: Synthetic oligonucleotide
  Description of Combined DNA/RNA Molecule: Synthetic oligonucleotide
  N-term hydroxyl group
  C-term hydroxyl group
  modified_base 1..1: /mod_base="OTHER" /note="GalNAc-morpholino-thymidine analog 7"
  modified_base 2..2: /mod_base="OTHER" /note="GalNAc-morpholino-thymidine analog 7"
  modified_base 3..3: /mod_base="OTHER" /note="GalNAc-morpholino-thymidine analog 7"
  modified_base 4..4: /mod_base="OTHER" /note="2'-OMe-nucleotide"
  modified_base 5..5: /mod_base="OTHER" /note="2'-OMe-nucleotide"
  modified_base 6..6: /mod_base="OTHER" /note="2'-OMe-nucleotide"
  modified_base 7..7: /mod_base="OTHER" /note="2'-OMe-nucleotide"
  modified_base 8..8: /mod_base="OTHER" /note="2'-fluoro-nucleotide"
  modified_base 9..9: /mod_base="OTHER" /note="2'-OMe-nucleotide"
  modified_base 10..10: /mod_base="OTHER" /note="2'-fluoro-nucleotide"
  modified_base 11..11: /mod_base="OTHER" /note="2'-OMe-nucleotide"
  modified_base 12..12: /mod_base="OTHER" /note="2'-fluoro-nucleotide"
  modified_base 13..13: /mod_base="OTHER" /note="2'-fluoro-nucleotide"
  modified_base 14..14: /mod_base="OTHER" /note="2'-fluoro-nucleotide"
  modified_base 15..15: /mod_base="OTHER" /note="2'-OMe-nucleotide"
  modified_base 16..16: /mod_base="OTHER" /note="2'-OMe-nucleotide"
  modified_base 17..17: /mod_base="OTHER" /note="2'-OMe-nucleotide"
  modified_base 18..18: /mod_base="OTHER" /note="2'-OMe-nucleotide"
  modified_base 19..19: /mod_base="OTHER" /note="2'-OMe-nucleotide"
  modified_base 20..20: /mod_base="OTHER" /note="2'-OMe-nucleotide"
  modified_base 21..21: /mod_base="OTHER" /note="2'-OMe-nucleotide"
  modified_base 22..22: /mod_base="OTHER" /note="2'-OMe-nucleotide"
  modified_base 23..23: /mod_base="OTHER" /note="Cyclohexane-morpholino-thymidine analog 4"
  modified_base 24..24: /mod_base="OTHER" /note="Cyclohexane-morpholino-thymidine analog 4"
tttauugaucaagacaauucautt

SEQ ID NO: 1012 - DNA, 24 bp, Artificial Sequence
  Description of Artificial Sequence: Synthetic oligonucleotide
  Description of Combined DNA/RNA Molecule: Synthetic oligonucleotide
  N-term hydroxyl group
  C-term hydroxyl group
  modified_base 1..1: /mod_base="OTHER" /note="GalNAc-morpholino-thymidine analog 7"
  modified_base 2..2: /mod_base="OTHER" /note="GalNAc-morpholino-thymidine analog 7"
  modified_base 3..3: /mod_base="OTHER" /note="GalNAc-morpholino-thymidine analog 7"
  modified_base 4..4: /mod_base="OTHER" /note="2'-OMe-nucleotide"
  modified_base 5..5: /mod_base="OTHER" /note="2'-OMe-nucleotide"
  modified_base 6..6: /mod_base="OTHER" /note="2'-OMe-nucleotide"
  modified_base 7..7: /mod_base="OTHER" /note="2'-OMe-nucleotide"
  modified_base 8..8: /mod_base="OTHER" /note="2'-fluoro-nucleotide"
  modified_base 9..9: /mod_base="OTHER" /note="2'-OMe-nucleotide"
  modified_base 10..10: /mod_base="OTHER" /note="2'-fluoro-nucleotide"
  modified_base 11..11: /mod_base="OTHER" /note="2'-OMe-nucleotide"
  modified_base 12..12: /mod_base="OTHER" /note="2'-fluoro-nucleotide"
  modified_base 13..13: /mod_base="OTHER" /note="2'-fluoro-nucleotide"
  modified_base 14..14: /mod_base="OTHER" /note="2'-fluoro-nucleotide"
  modified_base 15..15: /mod_base="OTHER" /note="2'-OMe-nucleotide"
  modified_base 16..16: /mod_base="OTHER" /note="2'-OMe-nucleotide"
  modified_base 17..17: /mod_base="OTHER" /note="2'-OMe-nucleotide"
  modified_base 18..18: /mod_base="OTHER" /note="2'-OMe-nucleotide"
  modified_base 19..19: /mod_base="OTHER" /note="2'-OMe-nucleotide"
  modified_base 20..20: /mod_base="OTHER" /note="2'-OMe-nucleotide"
  modified_base 21..21: /mod_base="OTHER" /note="2'-OMe-nucleotide"
  modified_base 22..22: /mod_base="OTHER" /note="2'-OMe-nucleotide"
  modified_base 23..23: /mod_base="OTHER" /note="Cyclohexane-morpholino-thymidine analog 4"
  modified_base 24..24: /mod_base="OTHER" /note="Cyclohexane-morpholino-thymidine analog 4"
tttauugaucaagacaauucautt

SEQ ID NO: 1013 - DNA, 24 bp, Artificial Sequence
  Description of Artificial Sequence: Synthetic oligonucleotide
  Description of Combined DNA/RNA Molecule: Synthetic oligonucleotide
  N-term hydroxyl group
  C-term hydroxyl group
  modified_base 1..1: /mod_base="OTHER" /note="GalNAc-morpholino-thymidine analog 7"
  modified_base 2..2: /mod_base="OTHER" /note="GalNAc-morpholino-thymidine analog 7"
  modified_base 3..3: /mod_base="OTHER" /note="GalNAc-morpholino-thymidine analog 7"
  modified_base 4..4: /mod_base="OTHER" /note="2'-OMe-nucleotide"
  modified_base 5..5: /mod_base="OTHER" /note="2'-OMe-nucleotide"
  modified_base 6..6: /mod_base="OTHER" /note="2'-OMe-nucleotide"
  modified_base 7..7: /mod_base="OTHER" /note="2'-OMe-nucleotide"
  modified_base 8..8: /mod_base="OTHER" /note="2'-fluoro-nucleotide"
  modified_base 9..9: /mod_base="OTHER" /note="2'-OMe-nucleotide"
  modified_base 10..10: /mod_base="OTHER" /note="2'-fluoro-nucleotide"
  modified_base 11..11: /mod_base="OTHER" /note="2'-OMe-nucleotide"
  modified_base 12..12: /mod_base="OTHER" /note="2'-fluoro-nucleotide"
  modified_base 13..13: /mod_base="OTHER" /note="2'-fluoro-nucleotide"
  modified_base 14..14: /mod_base="OTHER" /note="2'-fluoro-nucleotide"
  modified_base 15..15: /mod_base="OTHER" /note="2'-OMe-nucleotide"
  modified_base 16..16: /mod_base="OTHER" /note="2'-OMe-nucleotide"
  modified_base 17..17: /mod_base="OTHER" /note="2'-OMe-nucleotide"
  modified_base 18..18: /mod_base="OTHER" /note="2'-OMe-nucleotide"
  modified_base 19..19: /mod_base="OTHER" /note="2'-OMe-nucleotide"
  modified_base 20..20: /mod_base="OTHER" /note="2'-OMe-nucleotide"
  modified_base 21..21: /mod_base="OTHER" /note="2'-OMe-nucleotide"
  modified_base 22..22: /mod_base="OTHER" /note="2'-OMe-nucleotide"
  modified_base 23..23: /mod_base="OTHER" /note="Cyclohexane-morpholino-thymidine analog 4"
  modified_base 24..24: /mod_base="OTHER" /note="Cyclohexane-morpholino-thymidine analog 4"
tttauugaucaagacaauucautt

SEQ ID NO: 1014 - DNA, 24 bp, Artificial Sequence
  Description of Artificial Sequence: Synthetic oligonucleotide
  Description of Combined DNA/RNA Molecule: Synthetic oligonucleotide
  N-term hydroxyl group
  C-term hydroxyl group
  modified_base 1..1: /mod_base="OTHER" /note="GalNAc-morpholino-thymidine analog 7"
  modified_base 2..2: /mod_base="OTHER" /note="GalNAc-morpholino-thymidine analog 7"
  modified_base 3..3: /mod_base="OTHER" /note="GalNAc-morpholino-thymidine analog 7"
  modified_base 4..4: /mod_base="OTHER" /note="Locked nucleic acid (LNA) nucleotide"
  modified_base 5..5: /mod_base="OTHER" /note="Locked nucleic acid (LNA) nucleotide"
  modified_base 6..6: /mod_base="OTHER" /note="2'-OMe-nucleotide"
  modified_base 7..7: /mod_base="OTHER" /note="2'-OMe-nucleotide"
  modified_base 8..8: /mod_base="OTHER" /note="2'-fluoro-nucleotide"
  modified_base 9..9: /mod_base="OTHER" /note="2'-OMe-nucleotide"
  modified_base 10..10: /mod_base="OTHER" /note="2'-fluoro-nucleotide"
  modified_base 11..11: /mod_base="OTHER" /note="2'-OMe-nucleotide"
  modified_base 12..12: /mod_base="OTHER" /note="2'-fluoro-nucleotide"
  modified_base 13..13: /mod_base="OTHER" /note="2'-fluoro-nucleotide"
  modified_base 14..14: /mod_base="OTHER" /note="2'-fluoro-nucleotide"
  modified_base 15..15: /mod_base="OTHER" /note="2'-OMe-nucleotide"
  modified_base 16..16: /mod_base="OTHER" /note="2'-OMe-nucleotide"
  modified_base 17..17: /mod_base="OTHER" /note="2'-OMe-nucleotide"
  modified_base 18..18: /mod_base="OTHER" /note="2'-OMe-nucleotide"
  modified_base 19..19: /mod_base="OTHER" /note="2'-OMe-nucleotide"
  modified_base 20..20: /mod_base="OTHER" /note="2'-OMe-nucleotide"
  modified_base 21..21: /mod_base="OTHER" /note="2'-OMe-nucleotide"
  modified_base 22..22: /mod_base="OTHER" /note="2'-OMe-nucleotide"
  modified_base 23..23: /mod_base="OTHER" /note="Cyclohexane-morpholino-thymidine analog 4"
  modified_base 24..24: /mod_base="OTHER" /note="Cyclohexane-morpholino-thymidine analog 4"
tttauugaucaagacaauucautt

SEQ ID NO: 1015 - DNA, 24 bp, Artificial Sequence
  Description of Artificial Sequence: Synthetic oligonucleotide
  Description of Combined DNA/RNA Molecule: Synthetic oligonucleotide
  N-term hydroxyl group
  C-term hydroxyl group
  modified_base 1..1: /mod_base="OTHER" /note="GalNAc-morpholino-thymidine analog 7"
  modified_base 2..2: /mod_base="OTHER" /note="GalNAc-morpholino-thymidine analog 7"
  modified_base 3..3: /mod_base="OTHER" /note="GalNAc-morpholino-thymidine analog 7"
  modified_base 4..4: /mod_base="OTHER" /note="Locked nucleic acid (LNA) nucleotide"
  modified_base 5..5: /mod_base="OTHER" /note="Locked nucleic acid (LNA) nucleotide"
  modified_base 6..6: /mod_base="OTHER" /note="2'-OMe-nucleotide"
  modified_base 7..7: /mod_base="OTHER" /note="2'-OMe-nucleotide"
  modified_base 8..8: /mod_base="OTHER" /note="2'-fluoro-nucleotide"
  modified_base 9..9: /mod_base="OTHER" /note="2'-OMe-nucleotide"
  modified_base 10..10: /mod_base="OTHER" /note="2'-fluoro-nucleotide"
  modified_base 11..11: /mod_base="OTHER" /note="2'-OMe-nucleotide"
  modified_base 12..12: /mod_base="OTHER" /note="2'-fluoro-nucleotide"
  modified_base 13..13: /mod_base="OTHER" /note="2'-fluoro-nucleotide"
  modified_base 14..14: /mod_base="OTHER" /note="2'-fluoro-nucleotide"
  modified_base 15..15: /mod_base="OTHER" /note="2'-OMe-nucleotide"
  modified_base 16..16: /mod_base="OTHER" /note="2'-OMe-nucleotide"
  modified_base 17..17: /mod_base="OTHER" /note="2'-OMe-nucleotide"
  modified_base 18..18: /mod_base="OTHER" /note="2'-OMe-nucleotide"
  modified_base 19..19: /mod_base="OTHER" /note="2'-OMe-nucleotide"
  modified_base 20..20: /mod_base="OTHER" /note="2'-OMe-nucleotide"
  modified_base 21..21: /mod_base="OTHER" /note="2'-OMe-nucleotide"
  modified_base 22..22: /mod_base="OTHER" /note="2'-OMe-nucleotide"
  modified_base 23..23: /mod_base="OTHER" /note="Cyclohexane-morpholino-thymidine analog 4"
  modified_base 24..24: /mod_base="OTHER" /note="Cyclohexane-morpholino-thymidine analog 4"
tttauugaucaagacaauucautt

SEQ ID NO: 1016 - DNA, 24 bp, Artificial Sequence
  Description of Artificial Sequence: Synthetic oligonucleotide
  Description of Combined DNA/RNA Molecule: Synthetic oligonucleotide
  N-term hydroxyl group
  C-term hydroxyl group
  modified_base 1..1: /mod_base="OTHER" /note="GalNAc-morpholino-thymidine analog 7"
  modified_base 2..2: /mod_base="OTHER" /note="GalNAc-morpholino-thymidine analog 7"
  modified_base 3..3: /mod_base="OTHER" /note="GalNAc-morpholino-thymidine analog 7"
  modified_base 4..4: /mod_base="OTHER" /note="Locked nucleic acid (LNA) nucleotide"
  modified_base 5..5: /mod_base="OTHER" /note="Locked nucleic acid (LNA) nucleotide"
  modified_base 6..6: /mod_base="OTHER" /note="2'-OMe-nucleotide"
  modified_base 7..7: /mod_base="OTHER" /note="2'-OMe-nucleotide"
  modified_base 8..8: /mod_base="OTHER" /note="2'-fluoro-nucleotide"
  modified_base 9..9: /mod_base="OTHER" /note="2'-OMe-nucleotide"
  modified_base 10..10: /mod_base="OTHER" /note="2'-fluoro-nucleotide"
  modified_base 11..11: /mod_base="OTHER" /note="2'-OMe-nucleotide"
  modified_base 12..12: /mod_base="OTHER" /note="2'-fluoro-nucleotide"
  modified_base 13..13: /mod_base="OTHER" /note="2'-fluoro-nucleotide"
  modified_base 14..14: /mod_base="OTHER" /note="2'-fluoro-nucleotide"
  modified_base 15..15: /mod_base="OTHER" /note="2'-OMe-nucleotide"
  modified_base 16..16: /mod_base="OTHER" /note="2'-OMe-nucleotide"
  modified_base 17..17: /mod_base="OTHER" /note="2'-OMe-nucleotide"
  modified_base 18..18: /mod_base="OTHER" /note="2'-OMe-nucleotide"
  modified_base 19..19: /mod_base="OTHER" /note="2'-OMe-nucleotide"
  modified_base 20..20: /mod_base="OTHER" /note="2'-OMe-nucleotide"
  modified_base 21..21: /mod_base="OTHER" /note="2'-OMe-nucleotide"
  modified_base 22..22: /mod_base="OTHER" /note="2'-OMe-nucleotide"
  modified_base 23..23: /mod_base="OTHER" /note="Cyclohexane-morpholino-thymidine analog 4"
  modified_base 24..24: /mod_base="OTHER" /note="Cyclohexane-morpholino-thymidine analog 4"
tttauugaucaagacaauucautt

SEQ ID NO: 1017 - DNA, 24 bp, Artificial Sequence
  Description of Artificial Sequence: Synthetic oligonucleotide
  Description of Combined DNA/RNA Molecule: Synthetic oligonucleotide
  N-term hydroxyl group
  C-term hydroxyl group
  modified_base 1..1: /mod_base="OTHER" /note="GalNAc-morpholino-thymidine analog 7"
  modified_base 2..2: /mod_base="OTHER" /note="GalNAc-morpholino-thymidine analog 7"
  modified_base 3..3: /mod_base="OTHER" /note="GalNAc-morpholino-thymidine analog 7"
  modified_base 4..4: /mod_base="OTHER" /note="Locked nucleic acid (LNA) nucleotide"
  modified_base 5..5: /mod_base="OTHER" /note="Locked nucleic acid (LNA) nucleotide"
  modified_base 6..6: /mod_base="OTHER" /note="2'-OMe-nucleotide"
  modified_base 7..7: /mod_base="OTHER" /note="2'-OMe-nucleotide"
  modified_base 8..8: /mod_base="OTHER" /note="2'-fluoro-nucleotide"
  modified_base 9..9: /mod_base="OTHER" /note="2'-OMe-nucleotide"
  modified_base 10..10: /mod_base="OTHER" /note="2'-fluoro-nucleotide"
  modified_base 11..11: /mod_base="OTHER" /note="2'-OMe-nucleotide"
  modified_base 12..12: /mod_base="OTHER" /note="2'-fluoro-nucleotide"
  modified_base 13..13: /mod_base="OTHER" /note="2'-fluoro-nucleotide"
  modified_base 14..14: /mod_base="OTHER" /note="2'-fluoro-nucleotide"
  modified_base 15..15: /mod_base="OTHER" /note="2'-OMe-nucleotide"
  modified_base 16..16: /mod_base="OTHER" /note="2'-OMe-nucleotide"
  modified_base 17..17: /mod_base="OTHER" /note="2'-OMe-nucleotide"
  modified_base 18..18: /mod_base="OTHER" /note="2'-OMe-nucleotide"
  modified_base 19..19: /mod_base="OTHER" /note="2'-OMe-nucleotide"
  modified_base 20..20: /mod_base="OTHER" /note="2'-OMe-nucleotide"
  modified_base 21..21: /mod_base="OTHER" /note="2'-OMe-nucleotide"
  modified_base 22..22: /mod_base="OTHER" /note="2'-OMe-nucleotide"
  modified_base 23..23: /mod_base="OTHER" /note="Cyclohexane-morpholino-thymidine analog 4"
  modified_base 24..24: /mod_base="OTHER" /note="Cyclohexane-morpholino-thymidine analog 4"
tttauugaucaagacaauucautt

SEQ ID NO: 1018 - DNA, 24 bp, Artificial Sequence
  Description of Artificial Sequence: Synthetic oligonucleotide
  Description of Combined DNA/RNA Molecule: Synthetic oligonucleotide
  N-term hydroxyl group
  C-term hydroxyl group
  modified_base 1..1: /mod_base="OTHER" /note="GalNAc-morpholino-thymidine analog 7"
  modified_base 2..2: /mod_base="OTHER" /note="GalNAc-morpholino-thymidine analog 7"
  modified_base 3..3: /mod_base="OTHER" /note="GalNAc-morpholino-thymidine analog 7"
  modified_base 4..4: /mod_base="OTHER" /note="Locked nucleic acid (LNA) nucleotide"
  modified_base 5..5: /mod_base="OTHER" /note="Locked nucleic acid (LNA) nucleotide"
  modified_base 6..6: /mod_base="OTHER" /note="2'-OMe-nucleotide"
  modified_base 7..7: /mod_base="OTHER" /note="2'-OMe-nucleotide"
  modified_base 8..8: /mod_base="OTHER" /note="2'-fluoro-nucleotide"
  modified_base 9..9: /mod_base="OTHER" /note="2'-OMe-nucleotide"
  modified_base 10..10: /mod_base="OTHER" /note="2'-fluoro-nucleotide"
  modified_base 11..11: /mod_base="OTHER" /note="2'-OMe-nucleotide"
  modified_base 12..12: /mod_base="OTHER" /note="2'-fluoro-nucleotide"
  modified_base 13..13: /mod_base="OTHER" /note="2'-fluoro-nucleotide"
  modified_base 14..14: /mod_base="OTHER" /note="2'-fluoro-nucleotide"
  modified_base 15..15: /mod_base="OTHER" /note="2'-OMe-nucleotide"
  modified_base 16..16: /mod_base="OTHER" /note="2'-OMe-nucleotide"
  modified_base 17..17: /mod_base="OTHER" /note="2'-OMe-nucleotide"
  modified_base 18..18: /mod_base="OTHER" /note="2'-OMe-nucleotide"
  modified_base 19..19: /mod_base="OTHER" /note="2'-OMe-nucleotide"
  modified_base 20..20: /mod_base="OTHER" /note="2'-OMe-nucleotide"
  modified_base 21..21: /mod_base="OTHER" /note="2'-OMe-nucleotide"
  modified_base 22..22: /mod_base="OTHER" /note="2'-OMe-nucleotide"
  modified_base 23..23: /mod_base="OTHER" /note="Cyclohexane-morpholino-thymidine analog 4"
  modified_base 24..24: /mod_base="OTHER" /note="Cyclohexane-morpholino-thymidine analog 4"
tttauugaucaagacaauucautt

SEQ ID NO: 1019 - RNA, 21 nt, Artificial Sequence
  Description of Artificial Sequence: Synthetic oligonucleotide
  N-term hydroxyl group
  C-term hydroxyl group
  modified_base 1..1: /mod_base="OTHER" /note="2'-OMe-nucleotide"
  misc_feature 1..2: /note="phosphorothioate bond"
  modified_base 2..2: /mod_base="OTHER" /note="2'-fluoro-nucleotide"
  misc_feature 2..3: /note="phosphorothioate bond"
  modified_base 3..3: /mod_base="OTHER" /note="2'-OMe-nucleotide"
  modified_base 4..4: /mod_base="OTHER" /note="2'-fluoro-nucleotide"
  modified_base 5..5: /mod_base="OTHER" /note="2'-OMe-nucleotide"
  modified_base 6..6: /mod_base="OTHER" /note="2'-OMe-nucleotide"
  modified_base 7..7: /mod_base="OTHER" /note="2'-OMe-nucleotide"
  modified_base 8..8: /mod_base="OTHER" /note="2'-OMe-nucleotide"
  modified_base 9..9: /mod_base="OTHER" /note="2'-OMe-nucleotide"
  modified_base 10..10: /mod_base="OTHER" /note="2'-OMe-nucleotide"
  modified_base 11..11: /mod_base="OTHER" /note="2'-OMe-nucleotide"
  modified_base 12..12: /mod_base="OTHER" /note="2'-OMe-nucleotide"
  modified_base 13..13: /mod_base="OTHER" /note="2'-OMe-nucleotide"
  modified_base 14..14: /mod_base="OTHER" /note="2'-fluoro-nucleotide"
  modified_base 15..15: /mod_base="OTHER" /note="2'-OMe-nucleotide"
  modified_base 16..16: /mod_base="OTHER" /note="2'-fluoro-nucleotide"
  modified_base 17..17: /mod_base="OTHER" /note="2'-OMe-nucleotide"
  modified_base 18..18: /mod_base="OTHER" /note="2'-OMe-nucleotide"
  modified_base 19..19: /mod_base="OTHER" /note="2'-OMe-nucleotide"
  misc_feature 19..20: /note="phosphorothioate bond"
  modified_base 20..20: /mod_base="OTHER" /note="2'-OMe-nucleotide"
  misc_feature 20..21: /note="phosphorothioate bond"
  modified_base 21..21: /mod_base="OTHER" /note="2'-OMe-nucleotide"
aucaaaugaugaauugucuaa

SEQ ID NO: 1020 - RNA, 21 nt, Artificial Sequence
  Description of Artificial Sequence: Synthetic oligonucleotide
  N-term hydroxyl group
  C-term hydroxyl group
  modified_base 1..1: /mod_base="OTHER" /note="2'-OMe-nucleotide"
  misc_feature 1..2: /note="phosphorothioate bond"
  modified_base 2..2: /mod_base="OTHER" /note="2'-fluoro-nucleotide"
  misc_feature 2..3: /note="phosphorothioate bond"
  modified_base 3..3: /mod_base="OTHER" /note="2'-OMe-nucleotide"
  modified_base 4..4: /mod_base="OTHER" /note="2'-OMe-nucleotide"
  modified_base 5..5: /mod_base="OTHER" /note="2'-OMe-nucleotide"
  modified_base 6..6: /mod_base="OTHER" /note="2'-fluoro-nucleotide"
  modified_base 7..7: /mod_base="OTHER" /note="2'-OMe-nucleotide"
  modified_base 8..8: /mod_base="OTHER" /note="2'-OMe-nucleotide"
  modified_base 9..9: /mod_base="OTHER" /note="2'-OMe-nucleotide"
  modified_base 10..10: /mod_base="OTHER" /note="2'-OMe-nucleotide"
  modified_base 11..11: /mod_base="OTHER" /note="2'-OMe-nucleotide"
  modified_base 12..12: /mod_base="OTHER" /note="2'-OMe-nucleotide"
  modified_base 13..13: /mod_base="OTHER" /note="2'-OMe-nucleotide"
  modified_base 14..14: /mod_base="OTHER" /note="2'-fluoro-nucleotide"
  modified_base 15..15: /mod_base="OTHER" /note="2'-OMe-nucleotide"
  modified_base 16..16: /mod_base="OTHER" /note="2'-fluoro-nucleotide"
  modified_base 17..17: /mod_base="OTHER" /note="2'-OMe-nucleotide"
  modified_base 18..18: /mod_base="OTHER" /note="2'-OMe-nucleotide"
  modified_base 19..19: /mod_base="OTHER" /note="2'-OMe-nucleotide"
  misc_feature 19..20: /note="phosphorothioate bond"
  modified_base 20..20: /mod_base="OTHER" /note="2'-OMe-nucleotide"
  misc_feature 20..21: /note="phosphorothioate bond"
  modified_base 21..21: /mod_base="OTHER" /note="2'-OMe-nucleotide"
aucaaaugaugaauugucuaa

SEQ ID NO: 1021 - RNA, 21 nt, Artificial Sequence
  Description of Artificial Sequence: Synthetic oligonucleotide
  N-term hydroxyl group
  C-term hydroxyl group
  modified_base 1..1: /mod_base="OTHER" /note="2'-OMe-nucleotide"
  misc_feature 1..2: /note="phosphorothioate bond"
  modified_base 2..2: /mod_base="OTHER" /note="2'-fluoro-nucleotide"
  misc_feature 2..3: /note="phosphorothioate bond"
  modified_base 3..3: /mod_base="OTHER" /note="2'-OMe-nucleotide"
  modified_base 4..4: /mod_base="OTHER" /note="2'-fluoro-nucleotide"
  modified_base 5..5: /mod_base="OTHER" /note="2'-OMe-nucleotide"
  modified_base 6..6: /mod_base="OTHER" /note="2'-OMe-nucleotide"
  modified_base 7..7: /mod_base="OTHER" /note="2'-OMe-nucleotide"
  modified_base 8..8: /mod_base="OTHER" /note="2'-OMe-nucleotide"
  modified_base 9..9: /mod_base="OTHER" /note="2'-fluoro-nucleotide"
  modified_base 10..10: /mod_base="OTHER" /note="2'-OMe-nucleotide"
  modified_base 11..11: /mod_base="OTHER" /note="2'-OMe-nucleotide"
  modified_base 12..12: /mod_base="OTHER" /note="2'-OMe-nucleotide"
  modified_base 13..13: /mod_base="OTHER" /note="2'-OMe-nucleotide"
  modified_base 14..14: /mod_base="OTHER" /note="2'-fluoro-nucleotide"
  modified_base 15..15: /mod_base="OTHER" /note="2'-OMe-nucleotide"
  modified_base 16..16: /mod_base="OTHER" /note="2'-fluoro-nucleotide"
  modified_base 17..17: /mod_base="OTHER" /note="2'-OMe-nucleotide"
  modified_base 18..18: /mod_base="OTHER" /note="2'-OMe-nucleotide"
  modified_base 19..19: /mod_base="OTHER" /note="2'-OMe-nucleotide"
  misc_feature 19..20: /note="phosphorothioate bond"
  modified_base 20..20: /mod_base="OTHER" /note="2'-OMe-nucleotide"
  misc_feature 20..21: /note="phosphorothioate bond"
  modified_base 21..21: /mod_base="OTHER" /note="2'-OMe-nucleotide"
aucaaaugaugaauugucuaa

SEQ ID NO: 1022 - DNA, 21 bp, Artificial Sequence
  Description of Artificial Sequence: Synthetic oligonucleotide
  Description of Combined DNA/RNA Molecule: Synthetic oligonucleotide
  N-term hydroxyl group
  C-term hydroxyl group
  modified_base 1..1: /mod_base="OTHER" /note="2'-fluoro-nucleotide"
  misc_feature 1..2: /note="phosphorothioate bond"
  modified_base 2..2: /mod_base="OTHER" /note="2'-fluoro-nucleotide"
  misc_feature 2..3: /note="phosphorothioate bond"
  modified_base 3..3: /mod_base="OTHER" /note="2'-OMe-nucleotide"
  modified_base 4..4: /mod_base="OTHER" /note="2'-fluoro-nucleotide"
  modified_base 5..5: /mod_base="OTHER" /note="2'-OMe-nucleotide"
  modified_base 6..6: /mod_base="OTHER" /note="2'-fluoro-nucleotide"
  modified_base 7..7: /mod_base="OTHER" /note="2'-OMe-nucleotide"
  modified_base 8..8: /mod_base="OTHER" /note="2'-fluoro-nucleotide"
  modified_base 9..9: /mod_base="OTHER" /note="2'-OMe-nucleotide"
  modified_base 10..10: /mod_base="OTHER" /note="2'-fluoro-nucleotide"
  modified_base 11..11: /mod_base="OTHER" /note="2'-OMe-nucleotide"
  modified_base 12..12: /mod_base="OTHER" /note="2'-OMe-nucleotide"
  modified_base 13..13: /mod_base="OTHER" /note="2'-OMe-nucleotide"
  modified_base 14..14: /mod_base="OTHER" /note="2'-fluoro-nucleotide"
  modified_base 15..15: /mod_base="OTHER" /note="2'-OMe-nucleotide"
  modified_base 16..16: /mod_base="OTHER" /note="2'-fluoro-nucleotide"
  modified_base 17..17: /mod_base="OTHER" /note="2'-OMe-nucleotide"
  modified_base 18..18: /mod_base="OTHER" /note="2'-fluoro-nucleotide"
  modified_base 19..19: /mod_base="OTHER" /note="2'-OMe-nucleotide"
  misc_feature 19..20: /note="phosphorothioate bond"
  modified_base 20..20: /mod_base="OTHER" /note="dT"
  misc_feature 20..21: /note="phosphorothioate bond"
  modified_base 21..21: /mod_base="OTHER" /note="dT"
aucaaaugaugaauugucutt

SEQ ID NO: 1023 - RNA, 21 nt, Artificial Sequence
  Description of Artificial Sequence: Synthetic oligonucleotide
  N-term hydroxyl group
  C-term hydroxyl group
  modified_base 1..1: /mod_base="OTHER" /note="2'-OMe-nucleotide"
  misc_feature 1..2: /note="phosphorothioate bond"
  modified_base 2..2: /mod_base="OTHER" /note="2'-fluoro-nucleotide"
  misc_feature 2..3: /note="phosphorothioate bond"
  modified_base 3..3: /mod_base="OTHER" /note="2'-OMe-nucleotide"
  modified_base 4..4: /mod_base="OTHER" /note="2'-fluoro-nucleotide"
  modified_base 5..5: /mod_base="OTHER" /note="2'-OMe-nucleotide"
  modified_base 6..6: /mod_base="OTHER" /note="2'-OMe-nucleotide"
  modified_base 7..7: /mod_base="OTHER" /note="2'-OMe-nucleotide"
  modified_base 8..8: /mod_base="OTHER" /note="2'-OMe-nucleotide"
  modified_base 9..9: /mod_base="OTHER" /note="2'-OMe-nucleotide"
  modified_base 10..10: /mod_base="OTHER" /note="2'-OMe-nucleotide"
  modified_base 11..11: /mod_base="OTHER" /note="2'-OMe-nucleotide"
  modified_base 12..12: /mod_base="OTHER" /note="2'-OMe-nucleotide"
  modified_base 13..13: /mod_base="OTHER" /note="2'-OMe-nucleotide"
  modified_base 14..14: /mod_base="OTHER" /note="2'-fluoro-nucleotide"
  modified_base 15..15: /mod_base="OTHER" /note="2'-OMe-nucleotide"
  modified_base 16..16: /mod_base="OTHER" /note="2'-fluoro-nucleotide"
  modified_base 17..17: /mod_base="OTHER" /note="2'-OMe-nucleotide"
  modified_base 18..18: /mod_base="OTHER" /note="2'-OMe-nucleotide"
  modified_base 19..19: /mod_base="OTHER" /note="2'-OMe-nucleotide"
  misc_feature 19..20: /note="phosphorothioate bond"
  modified_base 20..20: /mod_base="OTHER" /note="2'-OMe-nucleotide"
  misc_feature 20..21: /note="phosphorothioate bond"
  modified_base 21..21: /mod_base="OTHER" /note="2'-OMe-nucleotide"
aucaaaugaugaauugucuaa

SEQ ID NO: 1024 - RNA, 21 nt, Artificial Sequence
  Description of Artificial Sequence: Synthetic oligonucleotide
  N-term hydroxyl group
  C-term hydroxyl group
  modified_base 1..1: /mod_base="OTHER" /note="2'-OMe-nucleotide"
  misc_feature 1..2: /note="phosphorothioate bond"
  modified_base 2..2: /mod_base="OTHER" /note="2'-fluoro-nucleotide"
  misc_feature 2..3: /note="phosphorothioate bond"
  modified_base 3..3: /mod_base="OTHER" /note="2'-OMe-nucleotide"
  modified_base 4..4: /mod_base="OTHER" /note="2'-OMe-nucleotide"
  modified_base 5..5: /mod_base="OTHER" /note="2'-OMe-nucleotide"
  modified_base 6..6: /mod_base="OTHER" /note="2'-fluoro-nucleotide"
  modified_base 7..7: /mod_base="OTHER" /note="2'-OMe-nucleotide"
  modified_base 8..8: /mod_base="OTHER" /note="2'-OMe-nucleotide"
  modified_base 9..9: /mod_base="OTHER" /note="2'-OMe-nucleotide"
  modified_base 10..10: /mod_base="OTHER" /note="2'-OMe-nucleotide"
  modified_base 11..11: /mod_base="OTHER" /note="2'-OMe-nucleotide"
  modified_base 12..12: /mod_base="OTHER" /note="2'-OMe-nucleotide"
  modified_base 13..13: /mod_base="OTHER" /note="2'-OMe-nucleotide"
  modified_base 14..14: /mod_base="OTHER" /note="2'-fluoro-nucleotide"
  modified_base 15..15: /mod_base="OTHER" /note="2'-OMe-nucleotide"
  modified_base 16..16: /mod_base="OTHER" /note="2'-fluoro-nucleotide"
  modified_base 17..17: /mod_base="OTHER" /note="2'-OMe-nucleotide"
  modified_base 18..18: /mod_base="OTHER" /note="2'-OMe-nucleotide"
  modified_base 19..19: /mod_base="OTHER" /note="2'-OMe-nucleotide"
  misc_feature 19..20: /note="phosphorothioate bond"
  modified_base 20..20: /mod_base="OTHER" /note="2'-OMe-nucleotide"
  misc_feature 20..21: /note="phosphorothioate bond"
  modified_base 21..21: /mod_base="OTHER" /note="2'-OMe-nucleotide"
aucaaaugaugaauugucuaa

SEQ ID NO: 1025 - RNA, 21 nt, Artificial Sequence
  Description of Artificial Sequence: Synthetic oligonucleotide
  N-term hydroxyl group
  C-term hydroxyl group
  modified_base 1..1: /mod_base="OTHER" /note="2'-OMe-nucleotide"
  misc_feature 1..2: /note="phosphorothioate bond"
  modified_base 2..2: /mod_base="OTHER" /note="2'-fluoro-nucleotide"
  misc_feature 2..3: /note="phosphorothioate bond"
  modified_base 3..3: /mod_base="OTHER" /note="2'-OMe-nucleotide"
  modified_base 4..4: /mod_base="OTHER" /note="2'-fluoro-nucleotide"
  modified_base 5..5: /mod_base="OTHER" /note="2'-OMe-nucleotide"
  modified_base 6..6: /mod_base="OTHER" /note="2'-OMe-nucleotide"
  modified_base 7..7: /mod_base="OTHER" /note="2'-OMe-nucleotide"
  modified_base 8..8: /mod_base="OTHER" /note="2'-OMe-nucleotide"
  modified_base 9..9: /mod_base="OTHER" /note="2'-fluoro-nucleotide"
  modified_base 10..10: /mod_base="OTHER" /note="2'-OMe-nucleotide"
  modified_base 11..11: /mod_base="OTHER" /note="2'-OMe-nucleotide"
  modified_base 12..12: /mod_base="OTHER" /note="2'-OMe-nucleotide"
  modified_base 13..13: /mod_base="OTHER" /note="2'-OMe-nucleotide"
  modified_base 14..14: /mod_base="OTHER" /note="2'-fluoro-nucleotide"
  modified_base 15..15: /mod_base="OTHER" /note="2'-OMe-nucleotide"
  modified_base 16..16: /mod_base="OTHER" /note="2'-fluoro-nucleotide"
  modified_base 17..17: /mod_base="OTHER" /note="2'-OMe-nucleotide"
  modified_base 18..18: /mod_base="OTHER" /note="2'-OMe-nucleotide"
  modified_base 19..19: /mod_base="OTHER" /note="2'-OMe-nucleotide"
  misc_feature 19..20: /note="phosphorothioate bond"
  modified_base 20..20: /mod_base="OTHER" /note="2'-OMe-nucleotide"
  misc_feature 20..21: /note="phosphorothioate bond"
  modified_base 21..21: /mod_base="OTHER" /note="2'-OMe-nucleotide"
aucaaaugaugaauugucuaa

SEQ ID NO: 1026 - DNA, 21 bp, Artificial Sequence
  Description of Artificial Sequence: Synthetic oligonucleotide
  Description of Combined DNA/RNA Molecule: Synthetic oligonucleotide
  N-term hydroxyl group
  C-term hydroxyl group
  modified_base 1..1: /mod_base="OTHER" /note="2'-fluoro-nucleotide"
  misc_feature 1..2: /note="phosphorothioate bond"
  modified_base 2..2: /mod_base="OTHER" /note="2'-fluoro-nucleotide"
  misc_feature 2..3: /note="phosphorothioate bond"
  modified_base 3..3: /mod_base="OTHER" /note="2'-OMe-nucleotide"
  modified_base 4..4: /mod_base="OTHER" /note="2'-fluoro-nucleotide"
  modified_base 5..5: /mod_base="OTHER" /note="2'-OMe-nucleotide"
  modified_base 6..6: /mod_base="OTHER" /note="2'-fluoro-nucleotide"
  modified_base 7..7: /mod_base="OTHER" /note="2'-OMe-nucleotide"
  modified_base 8..8: /mod_base="OTHER" /note="2'-fluoro-nucleotide"
  modified_base 9..9: /mod_base="OTHER" /note="2'-OMe-nucleotide"
  modified_base 10..10: /mod_base="OTHER" /note="2'-fluoro-nucleotide"
  modified_base 11..11: /mod_base="OTHER" /note="2'-OMe-nucleotide"
  modified_base 12..12: /mod_base="OTHER" /note="2'-OMe-nucleotide"
  modified_base 13..13: /mod_base="OTHER" /note="2'-OMe-nucleotide"
  modified_base 14..14: /mod_base="OTHER" /note="2'-fluoro-nucleotide"
  modified_base 15..15: /mod_base="OTHER" /note="2'-OMe-nucleotide"
  modified_base 16..16: /mod_base="OTHER" /note="2'-fluoro-nucleotide"
  modified_base 17..17: /mod_base="OTHER" /note="2'-OMe-nucleotide"
  modified_base 18..18: /mod_base="OTHER" /note="2'-fluoro-nucleotide"
  modified_base 19..19: /mod_base="OTHER" /note="2'-OMe-nucleotide"
  misc_feature 19..20: /note="phosphorothioate bond"
  modified_base 20..20: /mod_base="OTHER" /note="dT"
  misc_feature 20..21: /note="phosphorothioate bond"
  modified_base 21..21: /mod_base="OTHER" /note="dT"
aucaaaugaugaauugucutt

SEQ ID NO: 1027 - RNA, 21 nt, Artificial Sequence
  Description of Artificial Sequence: Synthetic oligonucleotide
  N-term hydroxyl group
  C-term hydroxyl group
  modified_base 1..1: /mod_base="OTHER" /note="2'-OMe-nucleotide"
  misc_feature 1..2: /note="phosphorothioate bond"
  modified_base 2..2: /mod_base="OTHER" /note="2'-fluoro-nucleotide"
  misc_feature 2..3: /note="phosphorothioate bond"
  modified_base 3..3: /mod_base="OTHER" /note="2'-OMe-nucleotide"
  modified_base 4..4: /mod_base="OTHER" /note="2'-fluoro-nucleotide"
  modified_base 5..5: /mod_base="OTHER" /note="2'-OMe-nucleotide"
  modified_base 6..6: /mod_base="OTHER" /note="2'-OMe-nucleotide"
  modified_base 7..7: /mod_base="OTHER" /note="2'-OMe-nucleotide"
  modified_base 8..8: /mod_base="OTHER" /note="2'-OMe-nucleotide"
  modified_base 9..9: /mod_base="OTHER" /note="2'-OMe-nucleotide"
  modified_base 10..10: /mod_base="OTHER" /note="2'-OMe-nucleotide"
  modified_base 11..11: /mod_base="OTHER" /note="2'-OMe-nucleotide"
  modified_base 12..12: /mod_base="OTHER" /note="2'-OMe-nucleotide"
  modified_base 13..13: /mod_base="OTHER" /note="2'-OMe-nucleotide"
  modified_base 14..14: /mod_base="OTHER" /note="2'-fluoro-nucleotide"
  modified_base 15..15: /mod_base="OTHER" /note="2'-OMe-nucleotide"
  modified_base 16..16: /mod_base="OTHER" /note="2'-fluoro-nucleotide"
  modified_base 17..17: /mod_base="OTHER" /note="2'-OMe-nucleotide"
  modified_base 18..18: /mod_base="OTHER" /note="2'-OMe-nucleotide"
  modified_base 19..19: /mod_base="OTHER" /note="2'-OMe-nucleotide"
  misc_feature 19..20: /note="phosphorothioate bond"
  modified_base 20..20: /mod_base="OTHER" /note="2'-OMe-nucleotide"
  misc_feature 20..21: /note="phosphorothioate bond"
  modified_base 21..21: /mod_base="OTHER" /note="2'-OMe-nucleotide"
aucaaaugaugaauugucuaa

SEQ ID NO: 1028 - RNA, 21 nt, Artificial Sequence
  Description of Artificial Sequence: Synthetic oligonucleotide
  N-term hydroxyl group
  C-term hydroxyl group
  modified_base 1..1: /mod_base="OTHER" /note="2'-OMe-nucleotide"
  misc_feature 1..2: /note="phosphorothioate bond"
  modified_base 2..2: /mod_base="OTHER" /note="2'-fluoro-nucleotide"
  misc_feature 2..3: /note="phosphorothioate bond"
  modified_base 3..3: /mod_base="OTHER" /note="2'-OMe-nucleotide"
  modified_base 4..4: /mod_base="OTHER" /note="2'-OMe-nucleotide"
  modified_base 5..5: /mod_base="OTHER" /note="2'-OMe-nucleotide"
  modified_base 6..6: /mod_base="OTHER" /note="2'-fluoro-nucleotide"
  modified_base 7..7: /mod_base="OTHER" /note="2'-OMe-nucleotide"
  modified_base 8..8: /mod_base="OTHER" /note="2'-OMe-nucleotide"
  modified_base 9..9: /mod_base="OTHER" /note="2'-OMe-nucleotide"
  modified_base 10..10: /mod_base="OTHER" /note="2'-OMe-nucleotide"
  modified_base 11..11: /mod_base="OTHER" /note="2'-OMe-nucleotide"
  modified_base 12..12: /mod_base="OTHER" /note="2'-OMe-nucleotide"
  modified_base 13..13: /mod_base="OTHER" /note="2'-OMe-nucleotide"
  modified_base 14..14: /mod_base="OTHER" /note="2'-fluoro-nucleotide"
  modified_base 15..15: /mod_base="OTHER" /note="2'-OMe-nucleotide"
  modified_base 16..16: /mod_base="OTHER" /note="2'-fluoro-nucleotide"
  modified_base 17..17: /mod_base="OTHER" /note="2'-OMe-nucleotide"
  modified_base 18..18: /mod_base="OTHER" /note="2'-OMe-nucleotide"
  modified_base 19..19: /mod_base="OTHER" /note="2'-OMe-nucleotide"
  misc_feature 19..20: /note="phosphorothioate bond"
  modified_base 20..20: /mod_base="OTHER" /note="2'-OMe-nucleotide"
  misc_feature 20..21: /note="phosphorothioate bond"
  modified_base 21..21: /mod_base="OTHER" /note="2'-OMe-nucleotide"
aucaaaugaugaauugucuaa

SEQ ID NO: 1029 - RNA, 21 nt, Artificial Sequence
  Description of Artificial Sequence: Synthetic oligonucleotide
  N-term hydroxyl group
  C-term hydroxyl group
  modified_base 1..1: /mod_base="OTHER" /note="2'-OMe-nucleotide"
  misc_feature 1..2: /note="phosphorothioate bond"
  modified_base 2..2: /mod_base="OTHER" /note="2'-fluoro-nucleotide"
  misc_feature 2..3: /note="phosphorothioate bond"
  modified_base 3..3: /mod_base="OTHER" /note="2'-OMe-nucleotide"
  modified_base 4..4: /mod_base="OTHER" /note="2'-fluoro-nucleotide"
  modified_base 5..5: /mod_base="OTHER" /note="2'-OMe-nucleotide"
  modified_base 6..6: /mod_base="OTHER" /note="2'-OMe-nucleotide"
  modified_base 7..7: /mod_base="OTHER" /note="2'-OMe-nucleotide"
  modified_base 8..8: /mod_base="OTHER" /note="2'-fluoro-nucleotide"
  modified_base 9..9: /mod_base="OTHER" /note="2'-OMe-nucleotide"
  modified_base 10..10: /mod_base="OTHER" /note="2'-OMe-nucleotide"
  modified_base 11..11: /mod_base="OTHER" /note="2'-OMe-nucleotide"
  modified_base 12..12: /mod_base="OTHER" /note="2'-OMe-nucleotide"
  modified_base 13..13: /mod_base="OTHER" /note="2'-OMe-nucleotide"
  modified_base 14..14: /mod_base="OTHER" /note="2'-fluoro-nucleotide"
  modified_base 15..15: /mod_base="OTHER" /note="2'-OMe-nucleotide"
  modified_base 16..16: /mod_base="OTHER" /note="2'-fluoro-nucleotide"
  modified_base 17..17: /mod_base="OTHER" /note="2'-OMe-nucleotide"
  modified_base 18..18: /mod_base="OTHER" /note="2'-OMe-nucleotide"
  modified_base 19..19: /mod_base="OTHER" /note="2'-OMe-nucleotide"
  misc_feature 19..20: /note="phosphorothioate bond"
  modified_base 20..20: /mod_base="OTHER" /note="2'-OMe-nucleotide"
  misc_feature 20..21: /note="phosphorothioate bond"
  modified_base 21..21: /mod_base="OTHER" /note="2'-OMe-nucleotide"
aucaaaugaugaauugucuaa

SEQ ID NO: 1030 - RNA, 21 nt, Artificial Sequence
  Description of Artificial Sequence: Synthetic oligonucleotide
  N-term hydroxyl group
  C-term hydroxyl group
  modified_base 1..1: /mod_base="OTHER" /note="2'-OMe-nucleotide"
  misc_feature 1..2: /note="phosphorothioate bond"
  modified_base 2..2: /mod_base="OTHER" /note="2'-fluoro-nucleotide"
  misc_feature 2..3: /note="phosphorothioate bond"
  modified_base 3..3: /mod_base="OTHER" /note="2'-OMe-nucleotide"
  modified_base 4..4: /mod_base="OTHER" /note="2'-OMe-nucleotide"
  modified_base 5..5: /mod_base="OTHER" /note="2'-OMe-nucleotide"
  modified_base 6..6: /mod_base="OTHER" /note="2'-OMe-nucleotide"
  modified_base 7..7: /mod_base="OTHER" /note="2'-OMe-nucleotide"
  modified_base 8..8: /mod_base="OTHER" /note="2'-fluoro-nucleotide"
  modified_base 9..9: /mod_base="OTHER" /note="2'-OMe-nucleotide"
  modified_base 10..10: /mod_base="OTHER" /note="2'-OMe-nucleotide"
  modified_base 11..11: /mod_base="OTHER" /note="2'-OMe-nucleotide"
  modified_base 12..12: /mod_base="OTHER" /note="2'-OMe-nucleotide"
  modified_base 13..13: /mod_base="OTHER" /note="2'-OMe-nucleotide"
  modified_base 14..14: /mod_base="OTHER" /note="2'-fluoro-nucleotide"
  modified_base 15..15: /mod_base="OTHER" /note="2'-OMe-nucleotide"
  modified_base 16..16: /mod_base="OTHER" /note="2'-fluoro-nucleotide"
  modified_base 17..17: /mod_base="OTHER" /note="2'-OMe-nucleotide"
  modified_base 18..18: /mod_base="OTHER" /note="2'-OMe-nucleotide"
  modified_base 19..19: /mod_base="OTHER" /note="2'-OMe-nucleotide"
  misc_feature 19..20: /note="phosphorothioate bond"
  modified_base 20..20: /mod_base="OTHER" /note="2'-OMe-nucleotide"
  misc_feature 20..21: /note="phosphorothioate bond"
  modified_base 21..21: /mod_base="OTHER" /note="2'-OMe-nucleotide"
aucaaaugaugaauugucuaa

SEQ ID NO: 1031 - DNA, 21 bp, Artificial Sequence
  Description of Artificial Sequence: Synthetic oligonucleotide
  Description of Combined DNA/RNA Molecule: Synthetic oligonucleotide
  N-term hydroxyl group
  C-term hydroxyl group
  modified_base 1..1: /mod_base="OTHER" /note="2'-fluoro-nucleotide"
  misc_feature 1..2: /note="phosphorothioate bond"
  modified_base 2..2: /mod_base="OTHER" /note="2'-fluoro-nucleotide"
  misc_feature 2..3: /note="phosphorothioate bond"
  modified_base 3..3: /mod_base="OTHER" /note="2'-OMe-nucleotide"
  modified_base 4..4: /mod_base="OTHER" /note="2'-fluoro-nucleotide"
  modified_base 5..5: /mod_base="OTHER" /note="2'-OMe-nucleotide"
  modified_base 6..6: /mod_base="OTHER" /note="2'-fluoro-nucleotide"
  modified_base 7..7: /mod_base="OTHER" /note="2'-OMe-nucleotide"
  modified_base 8..8: /mod_base="OTHER" /note="2'-fluoro-nucleotide"
  modified_base 9..9: /mod_base="OTHER" /note="2'-OMe-nucleotide"
  modified_base 10..10: /mod_base="OTHER" /note="2'-OMe-nucleotide"
  modified_base 11..11: /mod_base="OTHER" /note="2'-OMe-nucleotide"
  modified_base 12..12: /mod_base="OTHER" /note="2'-fluoro-nucleotide"
  modified_base 13..13: /mod_base="OTHER" /note="2'-OMe-nucleotide"
  modified_base 14..14: /mod_base="OTHER" /note="2'-fluoro-nucleotide"
  modified_base 15..15: /mod_base="OTHER" /note="2'-OMe-nucleotide"
  modified_base 16..16: /mod_base="OTHER" /note="2'-fluoro-nucleotide"
  modified_base 17..17: /mod_base="OTHER" /note="2'-OMe-nucleotide"
  modified_base 18..18: /mod_base="OTHER" /note="2'-fluoro-nucleotide"
  modified_base 19..19: /mod_base="OTHER" /note="2'-OMe-nucleotide"
  misc_feature 19..20: /note="phosphorothioate bond"
  modified_base 20..20: /mod_base="OTHER" /note="dT"
  misc_feature 20..21: /note="phosphorothioate bond"
  modified_base 21..21: /mod_base="OTHER" /note="dT"
aucaaaugaugaauugucutt

SEQ ID NO: 1032 - RNA, 21 nt, Artificial Sequence
  Description of Artificial Sequence: Synthetic oligonucleotide
  N-term hydroxyl group
  C-term hydroxyl group
  modified_base 1..1: /mod_base="OTHER" /note="2'-OMe-nucleotide"
  misc_feature 1..2: /note="phosphorothioate bond"
  modified_base 2..2: /mod_base="OTHER" /note="2'-fluoro-nucleotide"
  misc_feature 2..3: /note="phosphorothioate bond"
  modified_base 3..3: /mod_base="OTHER" /note="2'-OMe-nucleotide"
  modified_base 4..4: /mod_base="OTHER" /note="2'-fluoro-nucleotide"
  modified_base 5..5: /mod_base="OTHER" /note="2'-OMe-nucleotide"
  modified_base 6..6: /mod_base="OTHER" /note="2'-OMe-nucleotide"
  modified_base 7..7: /mod_base="OTHER" /note="2'-OMe-nucleotide"
  modified_base 8..8: /mod_base="OTHER" /note="2'-OMe-nucleotide"
  modified_base 9..9: /mod_base="OTHER" /note="2'-OMe-nucleotide"
  modified_base 10..10: /mod_base="OTHER" /note="2'-OMe-nucleotide"
  modified_base 11..11: /mod_base="OTHER" /note="2'-OMe-nucleotide"
  modified_base 12..12: /mod_base="OTHER" /note="2'-OMe-nucleotide"
  modified_base 13..13: /mod_base="OTHER" /note="2'-OMe-nucleotide"
  modified_base 14..14: /mod_base="OTHER" /note="2'-fluoro-nucleotide"
  modified_base 15..15: /mod_base="OTHER" /note="2'-OMe-nucleotide"
  modified_base 16..16: /mod_base="OTHER" /note="2'-fluoro-nucleotide"
  modified_base 17..17: /mod_base="OTHER" /note="2'-OMe-nucleotide"
  modified_base 18..18: /mod_base="OTHER" /note="2'-OMe-nucleotide"
  modified_base 19..19: /mod_base="OTHER" /note="2'-OMe-nucleotide"
  misc_feature 19..20: /note="phosphorothioate bond"
  modified_base 20..20: /mod_base="OTHER" /note="2'-OMe-nucleotide"
  misc_feature 20..21: /note="phosphorothioate bond"
  modified_base 21..21: /mod_base="OTHER" /note="2'-OMe-nucleotide"
aucaaaugaugaauugucuaa

SEQ ID NO: 1033 - RNA, 21 nt, Artificial Sequence
  Description of Artificial Sequence: Synthetic oligonucleotide
  N-term hydroxyl group
  C-term hydroxyl group
  modified_base 1..1: /mod_base="OTHER" /note="2'-OMe-nucleotide"
  misc_feature 1..2: /note="phosphorothioate bond"
  modified_base 2..2: /mod_base="OTHER" /note="2'-fluoro-nucleotide"
  misc_feature 2..3: /note="phosphorothioate bond"
  modified_base 3..3: /mod_base="OTHER" /note="2'-OMe-nucleotide"
  modified_base 4..4: /mod_base="OTHER" /note="2'-OMe-nucleotide"
  modified_base 5..5: /mod_base="OTHER" /note="2'-OMe-nucleotide"
  modified_base 6..6: /mod_base="OTHER" /note="2'-fluoro-nucleotide"
  modified_base 7..7: /mod_base="OTHER" /note="2'-OMe-nucleotide"
  modified_base 8..8: /mod_base="OTHER" /note="2'-OMe-nucleotide"
  modified_base 9..9: /mod_base="OTHER" /note="2'-OMe-nucleotide"
  modified_base 10..10: /mod_base="OTHER" /note="2'-OMe-nucleotide"
  modified_base 11..11: /mod_base="OTHER" /note="2'-OMe-nucleotide"
  modified_base 12..12: /mod_base="OTHER" /note="2'-OMe-nucleotide"
  modified_base 13..13: /mod_base="OTHER" /note="2'-OMe-nucleotide"
  modified_base 14..14: /mod_base="OTHER" /note="2'-fluoro-nucleotide"
  modified_base 15..15: /mod_base="OTHER" /note="2'-OMe-nucleotide"
  modified_base 16..16: /mod_base="OTHER" /note="2'-fluoro-nucleotide"
  modified_base 17..17: /mod_base="OTHER" /note="2'-OMe-nucleotide"
  modified_base 18..18: /mod_base="OTHER" /note="2'-OMe-nucleotide"
  modified_base 19..19: /mod_base="OTHER" /note="2'-OMe-nucleotide"
  misc_feature 19..20: /note="phosphorothioate bond"
  modified_base 20..20: /mod_base="OTHER" /note="2'-OMe-nucleotide"
  misc_feature 20..21: /note="phosphorothioate bond"
  modified_base 21..21: /mod_base="OTHER" /note="2'-OMe-nucleotide"
aucaaaugaugaauugucuaa

SEQ ID NO: 1034 - RNA, 21 nt, Artificial Sequence
  Description of Artificial Sequence: Synthetic oligonucleotide
  N-term hydroxyl group
  C-term hydroxyl group
  modified_base 1..1: /mod_base="OTHER" /note="2'-OMe-nucleotide"
  misc_feature 1..2: /note="phosphorothioate bond"
  modified_base 2..2: /mod_base="OTHER" /note="2'-fluoro-nucleotide"
  misc_feature 2..3: /note="phosphorothioate bond"
  modified_base 3..3: /mod_base="OTHER" /note="2'-OMe-nucleotide"
  modified_base 4..4: /mod_base="OTHER" /note="2'-fluoro-nucleotide"
  modified_base 5..5: /mod_base="OTHER" /note="2'-OMe-nucleotide"
  modified_base 6..6: /mod_base="OTHER" /note="2'-OMe-nucleotide"
  modified_base 7..7: /mod_base="OTHER" /note="2'-OMe-nucleotide"
  modified_base 8..8: /mod_base="OTHER" /note="2'-fluoro-nucleotide"
  modified_base 9..9: /mod_base="OTHER" /note="2'-OMe-nucleotide"
  modified_base 10..10: /mod_base="OTHER" /note="2'-OMe-nucleotide"
  modified_base 11..11: /mod_base="OTHER" /note="2'-OMe-nucleotide"
  modified_base 12..12: /mod_base="OTHER" /note="2'-OMe-nucleotide"
  modified_base 13..13: /mod_base="OTHER" /note="2'-OMe-nucleotide"
  modified_base 14..14: /mod_base="OTHER" /note="2'-fluoro-nucleotide"
  modified_base 15..15: /mod_base="OTHER" /note="2'-OMe-nucleotide"
  modified_base 16..16: /mod_base="OTHER" /note="2'-fluoro-nucleotide"
  modified_base 17..17: /mod_base="OTHER" /note="2'-OMe-nucleotide"
  modified_base 18..18: /mod_base="OTHER" /note="2'-OMe-nucleotide"
  modified_base 19..19: /mod_base="OTHER" /note="2'-OMe-nucleotide"
  misc_feature 19..20: /note="phosphorothioate bond"
  modified_base 20..20: /mod_base="OTHER" /note="2'-OMe-nucleotide"
  misc_feature 20..21: /note="phosphorothioate bond"
  modified_base 21..21: /mod_base="OTHER" /note="2'-OMe-nucleotide"
aucaaaugaugaauugucuaa

SEQ ID NO: 1035 - RNA, 21 nt, Artificial Sequence
  Description of Artificial Sequence: Synthetic oligonucleotide
  N-term hydroxyl group
  C-term hydroxyl group
  modified_base 1..1: /mod_base="OTHER" /note="2'-OMe-nucleotide"
  misc_feature 1..2: /note="phosphorothioate bond"
  modified_base 2..2: /mod_base="OTHER" /note="2'-fluoro-nucleotide"
  misc_feature 2..3: /note="phosphorothioate bond"
  modified_base 3..3: /mod_base="OTHER" /note="2'-OMe-nucleotide"
  modified_base 4..4: /mod_base="OTHER" /note="2'-OMe-nucleotide"
  modified_base 5..5: /mod_base="OTHER" /note="2'-OMe-nucleotide"
  modified_base 6..6: /mod_base="OTHER" /note="2'-OMe-nucleotide"
  modified_base 7..7: /mod_base="OTHER" /note="2'-OMe-nucleotide"
  modified_base 8..8: /mod_base="OTHER" /note="2'-fluoro-nucleotide"
  modified_base 9..9: /mod_base="OTHER" /note="2'-OMe-nucleotide"
  modified_base 10..10: /mod_base="OTHER" /note="2'-OMe-nucleotide"
  modified_base 11..11: /mod_base="OTHER" /note="2'-OMe-nucleotide"
  modified_base 12..12: /mod_base="OTHER" /note="2'-OMe-nucleotide"
  modified_base 13..13: /mod_base="OTHER" /note="2'-OMe-nucleotide"
  modified_base 14..14: /mod_base="OTHER" /note="2'-fluoro-nucleotide"
  modified_base 15..15: /mod_base="OTHER" /note="2'-OMe-nucleotide"
  modified_base 16..16: /mod_base="OTHER" /note="2'-fluoro-nucleotide"
  modified_base 17..17: /mod_base="OTHER" /note="2'-OMe-nucleotide"
  modified_base 18..18: /mod_base="OTHER" /note="2'-OMe-nucleotide"
  modified_base 19..19: /mod_base="OTHER" /note="2'-OMe-nucleotide"
  misc_feature 19..20: /note="phosphorothioate bond"
  modified_base 20..20: /mod_base="OTHER" /note="2'-OMe-nucleotide"
  misc_feature 20..21: /note="phosphorothioate bond"
  modified_base 21..21: /mod_base="OTHER" /note="2'-OMe-nucleotide"
aucaaaugaugaauugucuaa

SEQ ID NO: 1036 - DNA, 21 bp, Artificial Sequence
  Description of Artificial Sequence: Synthetic oligonucleotide
  Description of Combined DNA/RNA Molecule: Synthetic oligonucleotide
  N-term hydroxyl group
  C-term hydroxyl group
  modified_base 1..1: /mod_base="OTHER" /note="2'-fluoro-nucleotide"
  misc_feature 1..2: /note="phosphorothioate bond"
  modified_base 2..2: /mod_base="OTHER" /note="2'-fluoro-nucleotide"
  misc_feature 2..3: /note="phosphorothioate bond"
  modified_base 3..3: /mod_base="OTHER" /note="2'-OMe-nucleotide"
  modified_base 4..4: /mod_base="OTHER" /note="2'-fluoro-nucleotide"
  modified_base 5..5: /mod_base="OTHER" /note="2'-OMe-nucleotide"
  modified_base 6..6: /mod_base="OTHER" /note="2'-fluoro-nucleotide"
  modified_base 7..7: /mod_base="OTHER" /note="2'-OMe-nucleotide"
  modified_base 8..8: /mod_base="OTHER" /note="2'-fluoro-nucleotide"
  modified_base 9..9: /mod_base="OTHER" /note="2'-OMe-nucleotide"
  modified_base 10..10: /mod_base="OTHER" /note="2'-OMe-nucleotide"
  modified_base 11..11: /mod_base="OTHER" /note="2'-OMe-nucleotide"
  modified_base 12..12: /mod_base="OTHER" /note="2'-fluoro-nucleotide"
  modified_base 13..13: /mod_base="OTHER" /note="2'-OMe-nucleotide"
  modified_base 14..14: /mod_base="OTHER" /note="2'-fluoro-nucleotide"
  modified_base 15..15: /mod_base="OTHER" /note="2'-OMe-nucleotide"
  modified_base 16..16: /mod_base="OTHER" /note="2'-fluoro-nucleotide"
  modified_base 17..17: /mod_base="OTHER" /note="2'-OMe-nucleotide"
  modified_base 18..18: /mod_base="OTHER" /note="2'-fluoro-nucleotide"
  modified_base 19..19: /mod_base="OTHER" /note="2'-OMe-nucleotide"
  misc_feature 19..20: /note="phosphorothioate bond"
  modified_base 20..20: /mod_base="OTHER" /note="dT"
  misc_feature 20..21: /note="phosphorothioate bond"
  modified_base 21..21: /mod_base="OTHER" /note="dT"
aucaaaugaugaauugucutt

SEQ ID NO: 1037 - RNA, 21 nt, Artificial Sequence
  Description of Artificial Sequence: Synthetic oligonucleotide
  N-term hydroxyl group
  C-term hydroxyl group
  modified_base 1..1: /mod_base="OTHER" /note="2'-OMe-nucleotide"
  misc_feature 1..2: /note="phosphorothioate bond"
  modified_base 2..2: /mod_base="OTHER" /note="2'-fluoro-nucleotide"
  misc_feature 2..3: /note="phosphorothioate bond"
  modified_base 3..3: /mod_base="OTHER" /note="2'-OMe-nucleotide"
  modified_base 4..4: /mod_base="OTHER" /note="2'-fluoro-nucleotide"
  modified_base 5..5: /mod_base="OTHER" /note="2'-OMe-nucleotide"
  modified_base 6..6: /mod_base="OTHER" /note="2'-OMe-nucleotide"
  modified_base 7..7: /mod_base="OTHER" /note="2'-OMe-nucleotide"
  modified_base 8..8: /mod_base="OTHER" /note="2'-OMe-nucleotide"
  modified_base 9..9: /mod_base="OTHER" /note="2'-OMe-nucleotide"
  modified_base 10..10: /mod_base="OTHER" /note="2'-OMe-nucleotide"
  modified_base 11..11: /mod_base="OTHER" /note="2'-OMe-nucleotide"
  modified_base 12..12: /mod_base="OTHER" /note="2'-OMe-nucleotide"
  modified_base 13..13: /mod_base="OTHER" /note="2'-OMe-nucleotide"
  modified_base 14..14: /mod_base="OTHER" /note="2'-fluoro-nucleotide"
  modified_base 15..15: /mod_base="OTHER" /note="2'-OMe-nucleotide"
  modified_base 16..16: /mod_base="OTHER" /note="2'-fluoro-nucleotide"
  modified_base 17..17: /mod_base="OTHER" /note="2'-OMe-nucleotide"
  modified_base 18..18: /mod_base="OTHER" /note="2'-OMe-nucleotide"
  modified_base 19..19: /mod_base="OTHER" /note="2'-OMe-nucleotide"
  misc_feature 19..20: /note="phosphorothioate bond"
  modified_base 20..20: /mod_base="OTHER" /note="2'-OMe-nucleotide"
  misc_feature 20..21: /note="phosphorothioate bond"
  modified_base 21..21: /mod_base="OTHER" /note="2'-OMe-nucleotide"
aucaaaugaugaauugucuaa

SEQ ID NO: 1038 - RNA, 21 nt, Artificial Sequence
  Description of Artificial Sequence: Synthetic oligonucleotide
  N-term hydroxyl group
  C-term hydroxyl group
  modified_base 1..1: /mod_base="OTHER" /note="2'-OMe-nucleotide"
  misc_feature 1..2: /note="phosphorothioate bond"
  modified_base 2..2: /mod_base="OTHER" /note="2'-fluoro-nucleotide"
  misc_feature 2..3: /note="phosphorothioate bond"
  modified_base 3..3: /mod_base="OTHER" /note="2'-OMe-nucleotide"
  modified_base 4..4: /mod_base="OTHER" /note="2'-OMe-nucleotide"
  modified_base 5..5: /mod_base="OTHER" /note="2'-OMe-nucleotide"
  modified_base 6..6: /mod_base="OTHER" /note="2'-fluoro-nucleotide"
  modified_base 7..7: /mod_base="OTHER" /note="2'-OMe-nucleotide"
  modified_base 8..8: /mod_base="OTHER" /note="2'-OMe-nucleotide"
  modified_base 9..9: /mod_base="OTHER" /note="2'-OMe-nucleotide"
  modified_base 10..10: /mod_base="OTHER" /note="2'-OMe-nucleotide"
  modified_base 11..11: /mod_base="OTHER" /note="2'-OMe-nucleotide"
  modified_base 12..12: /mod_base="OTHER" /note="2'-OMe-nucleotide"
  modified_base 13..13: /mod_base="OTHER" /note="2'-OMe-nucleotide"
  modified_base 14..14: /mod_base="OTHER" /note="2'-fluoro-nucleotide"
  modified_base 15..15: /mod_base="OTHER" /note="2'-OMe-nucleotide"
  modified_base 16..16: /mod_base="OTHER" /note="2'-fluoro-nucleotide"
  modified_base 17..17: /mod_base="OTHER" /note="2'-OMe-nucleotide"
  modified_base 18..18: /mod_base="OTHER" /note="2'-OMe-nucleotide"
  modified_base 19..19: /mod_base="OTHER" /note="2'-OMe-nucleotide"
  misc_feature 19..20: /note="phosphorothioate bond"
  modified_base 20..20: /mod_base="OTHER" /note="2'-OMe-nucleotide"
  misc_feature 20..21: /note="phosphorothioate bond"
  modified_base 21..21: /mod_base="OTHER" /note="2'-OMe-nucleotide"
aucaaaugaugaauugucuaa

SEQ ID NO: 1039 - RNA, 21 nt, Artificial Sequence
  Description of Artificial Sequence: Synthetic oligonucleotide
  N-term hydroxyl group
  C-term hydroxyl group
  modified_base 1..1: /mod_base="OTHER" /note="2'-OMe-nucleotide"
  misc_feature 1..2: /note="phosphorothioate bond"
  modified_base 2..2: /mod_base="OTHER" /note="2'-fluoro-nucleotide"
  misc_feature 2..3: /note="phosphorothioate bond"
  modified_base 3..3: /mod_base="OTHER" /note="2'-OMe-nucleotide"
  modified_base 4..4: /mod_base="OTHER" /note="2'-fluoro-nucleotide"
  modified_base 5..5: /mod_base="OTHER" /note="2'-OMe-nucleotide"
  modified_base 6..6: /mod_base="OTHER" /note="2'-OMe-nucleotide"
  modified_base 7..7: /mod_base="OTHER" /note="2'-OMe-nucleotide"
  modified_base 8..8: /mod_base="OTHER" /note="2'-OMe-nucleotide"
  modified_base 9..9: /mod_base="OTHER" /note="2'-fluoro-nucleotide"
  modified_base 10..10: /mod_base="OTHER" /note="2'-OMe-nucleotide"
  modified_base 11..11: /mod_base="OTHER" /note="2'-OMe-nucleotide"
  modified_base 12..12: /mod_base="OTHER" /note="2'-OMe-nucleotide"
  modified_base 13..13: /mod_base="OTHER" /note="2'-OMe-nucleotide"
  modified_base 14..14: /mod_base="OTHER" /note="2'-fluoro-nucleotide"
  modified_base 15..15: /mod_base="OTHER" /note="2'-OMe-nucleotide"
  modified_base 16..16: /mod_base="OTHER" /note="2'-fluoro-nucleotide"
  modified_base 17..17: /mod_base="OTHER" /note="2'-OMe-nucleotide"
  modified_base 18..18: /mod_base="OTHER" /note="2'-OMe-nucleotide"
  modified_base 19..19: /mod_base="OTHER" /note="2'-OMe-nucleotide"
  misc_feature 19..20: /note="phosphorothioate bond"
  modified_base 20..20: /mod_base="OTHER" /note="2'-OMe-nucleotide"
  misc_feature 20..21: /note="phosphorothioate bond"
  modified_base 21..21: /mod_base="OTHER" /note="2'-OMe-nucleotide"
aucaaaugaugaauugucuaa

SEQ ID NO: 1040 - DNA, 21 bp, Artificial Sequence
  Description of Artificial Sequence: Synthetic oligonucleotide
  Description of Combined DNA/RNA Molecule: Synthetic oligonucleotide
  N-term hydroxyl group
  C-term hydroxyl group
  modified_base 1..1: /mod_base="OTHER" /note="2'-fluoro-nucleotide"
  misc_feature 1..2: /note="phosphorothioate bond"
  modified_base 2..2: /mod_base="OTHER" /note="2'-fluoro-nucleotide"
  misc_feature 2..3: /note="phosphorothioate bond"
  modified_base 3..3: /mod_base="OTHER" /note="2'-OMe-nucleotide"
  modified_base 4..4: /mod_base="OTHER" /note="2'-fluoro-nucleotide"
  modified_base 5..5: /mod_base="OTHER" /note="2'-OMe-nucleotide"
  modified_base 6..6: /mod_base="OTHER" /note="2'-fluoro-nucleotide"
  modified_base 7..7: /mod_base="OTHER" /note="2'-OMe-nucleotide"
  modified_base 8..8: /mod_base="OTHER" /note="2'-fluoro-nucleotide"
  modified_base 9..9: /mod_base="OTHER" /note="2'-OMe-nucleotide"
  modified_base 10..10: /mod_base="OTHER" /note="2'-fluoro-nucleotide"
  modified_base 11..11: /mod_base="OTHER" /note="2'-OMe-nucleotide"
  modified_base 12..12: /mod_base="OTHER" /note="2'-OMe-nucleotide"
  modified_base 13..13: /mod_base="OTHER" /note="2'-OMe-nucleotide"
  modified_base 14..14: /mod_base="OTHER" /note="2'-fluoro-nucleotide"
  modified_base 15..15: /mod_base="OTHER" /note="2'-OMe-nucleotide"
  modified_base 16..16: /mod_base="OTHER" /note="2'-fluoro-nucleotide"
  modified_base 17..17: /mod_base="OTHER" /note="2'-OMe-nucleotide"
  modified_base 18..18: /mod_base="OTHER" /note="2'-fluoro-nucleotide"
  modified_base 19..19: /mod_base="OTHER" /note="2'-OMe-nucleotide"
  misc_feature 19..20: /note="phosphorothioate bond"
  modified_base 20..20: /mod_base="OTHER" /note="dT"
  misc_feature 20..21: /note="phosphorothioate bond"
  modified_base 21..21: /mod_base="OTHER" /note="dT"
aucaaaugaugaauugucutt

SEQ ID NO: 1041 - RNA, 21 nt, Artificial Sequence
  Description of Artificial Sequence: Synthetic oligonucleotide
  N-term hydroxyl group
  C-term hydroxyl group
  modified_base 1..1: /mod_base="OTHER" /note="2'-OMe-nucleotide"
  misc_feature 1..2: /note="phosphorothioate bond"
  modified_base 2..2: /mod_base="OTHER" /note="2'-fluoro-nucleotide"
  misc_feature 2..3: /note="phosphorothioate bond"
  modified_base 3..3: /mod_base="OTHER" /note="2'-OMe-nucleotide"
  modified_base 4..4: /mod_base="OTHER" /note="2'-fluoro-nucleotide"
  modified_base 5..5: /mod_base="OTHER" /note="2'-OMe-nucleotide"
  modified_base 6..6: /mod_base="OTHER" /note="2'-OMe-nucleotide"
  modified_base 7..7: /mod_base="OTHER" /note="2'-OMe-nucleotide"
  modified_base 8..8: /mod_base="OTHER" /note="2'-OMe-nucleotide"
  modified_base 9..9: /mod_base="OTHER" /note="2'-OMe-nucleotide"
  modified_base 10..10: /mod_base="OTHER" /note="2'-OMe-nucleotide"
  modified_base 11..11: /mod_base="OTHER" /note="2'-OMe-nucleotide"
  modified_base 12..12: /mod_base="OTHER" /note="2'-OMe-nucleotide"
  modified_base 13..13: /mod_base="OTHER" /note="2'-OMe-nucleotide"
  modified_base 14..14: /mod_base="OTHER" /note="2'-fluoro-nucleotide"
  modified_base 15..15: /mod_base="OTHER" /note="2'-OMe-nucleotide"
  modified_base 16..16: /mod_base="OTHER" /note="2'-fluoro-nucleotide"
  modified_base 17..17: /mod_base="OTHER" /note="2'-OMe-nucleotide"
  modified_base 18..18: /mod_base="OTHER" /note="2'-OMe-nucleotide"
  modified_base 19..19: /mod_base="OTHER" /note="2'-OMe-nucleotide"
  misc_feature 19..20: /note="phosphorothioate bond"
  modified_base 20..20: /mod_base="OTHER" /note="2'-OMe-nucleotide"
  misc_feature 20..21: /note="phosphorothioate bond"
  modified_base 21..21: /mod_base="OTHER" /note="2'-OMe-nucleotide"
aucaaaugaugaauugucuaa

SEQ ID NO: 1042 - RNA, 21 nt, Artificial Sequence
  Description of Artificial Sequence: Synthetic oligonucleotide
  N-term hydroxyl group
  C-term hydroxyl group
  modified_base 1..1: /mod_base="OTHER" /note="2'-OMe-nucleotide"
  misc_feature 1..2: /note="phosphorothioate bond"
  modified_base 2..2: /mod_base="OTHER" /note="2'-fluoro-nucleotide"
  misc_feature 2..3: /note="phosphorothioate bond"
  modified_base 3..3: /mod_base="OTHER" /note="2'-OMe-nucleotide"
  modified_base 4..4: /mod_base="OTHER" /note="2'-OMe-nucleotide"
  modified_base 5..5: /mod_base="OTHER" /note="2'-OMe-nucleotide"
  modified_base 6..6: /mod_base="OTHER" /note="2'-fluoro-nucleotide"
  modified_base 7..7: /mod_base="OTHER" /note="2'-OMe-nucleotide"
  modified_base 8..8: /mod_base="OTHER" /note="2'-OMe-nucleotide"
  modified_base 9..9: /mod_base="OTHER" /note="2'-OMe-nucleotide"
  modified_base 10..10: /mod_base="OTHER" /note="2'-OMe-nucleotide"
  modified_base 11..11: /mod_base="OTHER" /note="2'-OMe-nucleotide"
  modified_base 12..12: /mod_base="OTHER" /note="2'-OMe-nucleotide"
  modified_base 13..13: /mod_base="OTHER" /note="2'-OMe-nucleotide"
  modified_base 14..14: /mod_base="OTHER" /note="2'-fluoro-nucleotide"
  modified_base 15..15: /mod_base="OTHER" /note="2'-OMe-nucleotide"
  modified_base 16..16: /mod_base="OTHER" /note="2'-fluoro-nucleotide"
  modified_base 17..17: /mod_base="OTHER" /note="2'-OMe-nucleotide"
  modified_base 18..18: /mod_base="OTHER" /note="2'-OMe-nucleotide"
  modified_base 19..19: /mod_base="OTHER" /note="2'-OMe-nucleotide"
  misc_feature 19..20: /note="phosphorothioate bond"
  modified_base 20..20: /mod_base="OTHER" /note="2'-OMe-nucleotide"
  misc_feature 20..21: /note="phosphorothioate bond"
  modified_base 21..21: /mod_base="OTHER" /note="2'-OMe-nucleotide"
aucaaaugaugaauugucuaa

SEQ ID NO: 1043 - RNA, 21 nt, Artificial Sequence
  Description of Artificial Sequence: Synthetic oligonucleotide
  N-term hydroxyl group
  C-term hydroxyl group
  modified_base 1..1: /mod_base="OTHER" /note="2'-OMe-nucleotide"
  misc_feature 1..2: /note="phosphorothioate bond"
  modified_base 2..2: /mod_base="OTHER" /note="2'-fluoro-nucleotide"
  misc_feature 2..3: /note="phosphorothioate bond"
  modified_base 3..3: /mod_base="OTHER" /note="2'-OMe-nucleotide"
  modified_base 4..4: /mod_base="OTHER" /note="2'-fluoro-nucleotide"
  modified_base 5..5: /mod_base="OTHER" /note="2'-OMe-nucleotide"
  modified_base 6..6: /mod_base="OTHER" /note="2'-OMe-nucleotide"
  modified_base 7..7: /mod_base="OTHER" /note="2'-OMe-nucleotide"
  modified_base 8..8: /mod_base="OTHER" /note="2'-OMe-nucleotide"
  modified_base 9..9: /mod_base="OTHER" /note="2'-fluoro-nucleotide"
  modified_base 10..10: /mod_base="OTHER" /note="2'-OMe-nucleotide"
  modified_base 11..11: /mod_base="OTHER" /note="2'-OMe-nucleotide"
  modified_base 12..12: /mod_base="OTHER" /note="2'-OMe-nucleotide"
  modified_base 13..13: /mod_base="OTHER" /note="2'-OMe-nucleotide"
  modified_base 14..14: /mod_base="OTHER" /note="2'-fluoro-nucleotide"
  modified_base 15..15: /mod_base="OTHER" /note="2'-OMe-nucleotide"
  modified_base 16..16: /mod_base="OTHER" /note="2'-fluoro-nucleotide"
  modified_base 17..17: /mod_base="OTHER" /note="2'-OMe-nucleotide"
  modified_base 18..18: /mod_base="OTHER" /note="2'-OMe-nucleotide"
  modified_base 19..19: /mod_base="OTHER" /note="2'-OMe-nucleotide"
  misc_feature 19..20: /note="phosphorothioate bond"
  modified_base 20..20: /mod_base="OTHER" /note="2'-OMe-nucleotide"
  misc_feature 20..21: /note="phosphorothioate bond"
  modified_base 21..21: /mod_base="OTHER" /note="2'-OMe-nucleotide"
aucaaaugaugaauugucuaa

SEQ ID NO: 1044 - DNA, 21 bp, Artificial Sequence
  Description of Artificial Sequence: Synthetic oligonucleotide
  Description of Combined DNA/RNA Molecule: Synthetic oligonucleotide
  N-term hydroxyl group
  C-term hydroxyl group
  modified_base 1..1: /mod_base="OTHER" /note="2'-fluoro-nucleotide"
  misc_feature 1..2: /note="phosphorothioate bond"
  modified_base 2..2: /mod_base="OTHER" /note="2'-fluoro-nucleotide"
  misc_feature 2..3: /note="phosphorothioate bond"
  modified_base 3..3: /mod_base="OTHER" /note="2'-OMe-nucleotide"
  modified_base 4..4: /mod_base="OTHER" /note="2'-fluoro-nucleotide"
  modified_base 5..5: /mod_base="OTHER" /note="2'-OMe-nucleotide"
  modified_base 6..6: /mod_base="OTHER" /note="2'-fluoro-nucleotide"
  modified_base 7..7: /mod_base="OTHER" /note="2'-OMe-nucleotide"
  modified_base 8..8: /mod_base="OTHER" /note="2'-fluoro-nucleotide"
  modified_base 9..9: /mod_base="OTHER" /note="2'-OMe-nucleotide"
  modified_base 10..10: /mod_base="OTHER" /note="2'-fluoro-nucleotide"
  modified_base 11..11: /mod_base="OTHER" /note="2'-OMe-nucleotide"
  modified_base 12..12: /mod_base="OTHER" /note="2'-OMe-nucleotide"
  modified_base 13..13: /mod_base="OTHER" /note="2'-OMe-nucleotide"
  modified_base 14..14: /mod_base="OTHER" /note="2'-fluoro-nucleotide"
  modified_base 15..15: /mod_base="OTHER" /note="2'-OMe-nucleotide"
  modified_base 16..16: /mod_base="OTHER" /note="2'-fluoro-nucleotide"
  modified_base 17..17: /mod_base="OTHER" /note="2'-OMe-nucleotide"
  modified_base 18..18: /mod_base="OTHER" /note="2'-fluoro-nucleotide"
  modified_base 19..19: /mod_base="OTHER" /note="2'-OMe-nucleotide"
  misc_feature 19..20: /note="phosphorothioate bond"
  modified_base 20..20: /mod_base="OTHER" /note="dT"
  misc_feature 20..21: /note="phosphorothioate bond"
  modified_base 21..21: /mod_base="OTHER" /note="dT"
aucaaaugaugaauugucutt

SEQ ID NO: 1045 - RNA, 21 nt, Artificial Sequence
  Description of Artificial Sequence: Synthetic oligonucleotide
  N-term hydroxyl group
  C-term hydroxyl group
  modified_base 1..1: /mod_base="OTHER" /note="2'-OMe-nucleotide"
  misc_feature 1..2: /note="phosphorothioate bond"
  modified_base 2..2: /mod_base="OTHER" /note="2'-fluoro-nucleotide"
  misc_feature 2..3: /note="phosphorothioate bond"
  modified_base 3..3: /mod_base="OTHER" /note="2'-OMe-nucleotide"
  modified_base 4..4: /mod_base="OTHER" /note="2'-fluoro-nucleotide"
  modified_base 5..5: /mod_base="OTHER" /note="2'-OMe-nucleotide"
  modified_base 6..6: /mod_base="OTHER" /note="2'-OMe-nucleotide"
  modified_base 7..7: /mod_base="OTHER" /note="2'-OMe-nucleotide"
  modified_base 8..8: /mod_base="OTHER" /note="2'-OMe-nucleotide"
  modified_base 9..9: /mod_base="OTHER" /note="2'-OMe-nucleotide"
  modified_base 10..10: /mod_base="OTHER" /note="2'-OMe-nucleotide"
  modified_base 11..11: /mod_base="OTHER" /note="2'-OMe-nucleotide"
  modified_base 12..12: /mod_base="OTHER" /note="2'-OMe-nucleotide"
  modified_base 13..13: /mod_base="OTHER" /note="2'-OMe-nucleotide"
  modified_base 14..14: /mod_base="OTHER" /note="2'-fluoro-nucleotide"
  modified_base 15..15: /mod_base="OTHER" /note="2'-OMe-nucleotide"
  modified_base 16..16: /mod_base="OTHER" /note="2'-fluoro-nucleotide"
  modified_base 17..17: /mod_base="OTHER" /note="2'-OMe-nucleotide"
  modified_base 18..18: /mod_base="OTHER" /note="2'-OMe-nucleotide"
  modified_base 19..19: /mod_base="OTHER" /note="2'-OMe-nucleotide"
  misc_feature 19..20: /note="phosphorothioate bond"
  modified_base 20..20: /mod_base="OTHER" /note="2'-OMe-nucleotide"
  misc_feature 20..21: /note="phosphorothioate bond"
  modified_base 21..21: /mod_base="OTHER" /note="2'-OMe-nucleotide"
aucaaaugaugaauugucuaa

SEQ ID NO: 1046 - RNA, 21 nt, Artificial Sequence
  Description of Artificial Sequence: Synthetic oligonucleotide
  N-term hydroxyl group
  C-term hydroxyl group
  modified_base 1..1: /mod_base="OTHER" /note="2'-OMe-nucleotide"
  misc_feature 1..2: /note="phosphorothioate bond"
  modified_base 2..2: /mod_base="OTHER" /note="2'-fluoro-nucleotide"
  misc_feature 2..3: /note="phosphorothioate bond"
  modified_base 3..3: /mod_base="OTHER" /note="2'-OMe-nucleotide"
  modified_base 4..4: /mod_base="OTHER" /note="2'-OMe-nucleotide"
  modified_base 5..5: /mod_base="OTHER" /note="2'-OMe-nucleotide"
  modified_base 6..6: /mod_base="OTHER" /note="2'-fluoro-nucleotide"
  modified_base 7..7: /mod_base="OTHER" /note="2'-OMe-nucleotide"
  modified_base 8..8: /mod_base="OTHER" /note="2'-OMe-nucleotide"
  modified_base 9..9: /mod_base="OTHER" /note="2'-OMe-nucleotide"
  modified_base 10..10: /mod_base="OTHER" /note="2'-OMe-nucleotide"
  modified_base 11..11: /mod_base="OTHER" /note="2'-OMe-nucleotide"
  modified_base 12..12: /mod_base="OTHER" /note="2'-OMe-nucleotide"
  modified_base 13..13: /mod_base="OTHER" /note="2'-OMe-nucleotide"
  modified_base 14..14: /mod_base="OTHER" /note="2'-fluoro-nucleotide"
  modified_base 15..15: /mod_base="OTHER" /note="2'-OMe-nucleotide"
  modified_base 16..16: /mod_base="OTHER" /note="2'-fluoro-nucleotide"
  modified_base 17..17: /mod_base="OTHER" /note="2'-OMe-nucleotide"
  modified_base 18..18: /mod_base="OTHER" /note="2'-OMe-nucleotide"
  modified_base 19..19: /mod_base="OTHER" /note="2'-OMe-nucleotide"
  misc_feature 19..20: /note="phosphorothioate bond"
  modified_base 20..20: /mod_base="OTHER" /note="2'-OMe-nucleotide"
  misc_feature 20..21: /note="phosphorothioate bond"
  modified_base 21..21: /mod_base="OTHER" /note="2'-OMe-nucleotide"
aucaaaugaugaauugucuaa

SEQ ID NO: 1047 - RNA, 21 nt, Artificial Sequence
  Description of Artificial Sequence: Synthetic oligonucleotide
  N-term hydroxyl group
  C-term hydroxyl group
  modified_base 1..1: /mod_base="OTHER" /note="2'-OMe-nucleotide"
  misc_feature 1..2: /note="phosphorothioate bond"
  modified_base 2..2: /mod_base="OTHER" /note="2'-fluoro-nucleotide"
  misc_feature 2..3: /note="phosphorothioate bond"
  modified_base 3..3: /mod_base="OTHER" /note="2'-OMe-nucleotide"
  modified_base 4..4: /mod_base="OTHER" /note="2'-fluoro-nucleotide"
  modified_base 5..5: /mod_base="OTHER" /note="2'-OMe-nucleotide"
  modified_base 6..6: /mod_base="OTHER" /note="2'-OMe-nucleotide"
  modified_base 7..7: /mod_base="OTHER" /note="2'-OMe-nucleotide"
  modified_base 8..8: /mod_base="OTHER" /note="2'-fluoro-nucleotide"
  modified_base 9..9: /mod_base="OTHER" /note="2'-OMe-nucleotide"
  modified_base 10..10: /mod_base="OTHER" /note="2'-OMe-nucleotide"
  modified_base 11..11: /mod_base="OTHER" /note="2'-OMe-nucleotide"
  modified_base 12..12: /mod_base="OTHER" /note="2'-OMe-nucleotide"
  modified_base 13..13: /mod_base="OTHER" /note="2'-OMe-nucleotide"
  modified_base 14..14: /mod_base="OTHER" /note="2'-fluoro-nucleotide"
  modified_base 15..15: /mod_base="OTHER" /note="2'-OMe-nucleotide"
  modified_base 16..16: /mod_base="OTHER" /note="2'-fluoro-nucleotide"
  modified_base 17..17: /mod_base="OTHER" /note="2'-OMe-nucleotide"
  modified_base 18..18: /mod_base="OTHER" /note="2'-OMe-nucleotide"
  modified_base 19..19: /mod_base="OTHER" /note="2'-OMe-nucleotide"
  misc_feature 19..20: /note="phosphorothioate bond"
  modified_base 20..20: /mod_base="OTHER" /note="2'-OMe-nucleotide"
  misc_feature 20..21: /note="phosphorothioate bond"
  modified_base 21..21: /mod_base="OTHER" /note="2'-OMe-nucleotide"
aucaaaugaugaauugucuaa

SEQ ID NO: 1048 - RNA, 21 nt, Artificial Sequence
  Description of Artificial Sequence: Synthetic oligonucleotide
  N-term hydroxyl group
  C-term hydroxyl group
  modified_base 1..1: /mod_base="OTHER" /note="2'-OMe-nucleotide"
  misc_feature 1..2: /note="phosphorothioate bond"
  modified_base 2..2: /mod_base="OTHER" /note="2'-fluoro-nucleotide"
  misc_feature 2..3: /note="phosphorothioate bond"
  modified_base 3..3: /mod_base="OTHER" /note="2'-OMe-nucleotide"
  modified_base 4..4: /mod_base="OTHER" /note="2'-OMe-nucleotide"
  modified_base 5..5: /mod_base="OTHER" /note="2'-OMe-nucleotide"
  modified_base 6..6: /mod_base="OTHER" /note="2'-OMe-nucleotide"
  modified_base 7..7: /mod_base="OTHER" /note="2'-OMe-nucleotide"
  modified_base 8..8: /mod_base="OTHER" /note="2'-fluoro-nucleotide"
  modified_base 9..9: /mod_base="OTHER" /note="2'-OMe-nucleotide"
  modified_base 10..10: /mod_base="OTHER" /note="2'-OMe-nucleotide"
  modified_base 11..11: /mod_base="OTHER" /note="2'-OMe-nucleotide"
  modified_base 12..12: /mod_base="OTHER" /note="2'-OMe-nucleotide"
  modified_base 13..13: /mod_base="OTHER" /note="2'-OMe-nucleotide"
  modified_base 14..14: /mod_base="OTHER" /note="2'-fluoro-nucleotide"
  modified_base 15..15: /mod_base="OTHER" /note="2'-OMe-nucleotide"
  modified_base 16..16: /mod_base="OTHER" /note="2'-fluoro-nucleotide"
  modified_base 17..17: /mod_base="OTHER" /note="2'-OMe-nucleotide"
  modified_base 18..18: /mod_base="OTHER" /note="2'-OMe-nucleotide"
  modified_base 19..19: /mod_base="OTHER" /note="2'-OMe-nucleotide"
  misc_feature 19..20: /note="phosphorothioate bond"
  modified_base 20..20: /mod_base="OTHER" /note="2'-OMe-nucleotide"
  misc_feature 20..21: /note="phosphorothioate bond"
  modified_base 21..21: /mod_base="OTHER" /note="2'-OMe-nucleotide"
aucaaaugaugaauugucuaa

SEQ ID NO: 1049 - DNA, 21 bp, Artificial Sequence
  Description of Artificial Sequence: Synthetic oligonucleotide
  Description of Combined DNA/RNA Molecule: Synthetic oligonucleotide
  N-term hydroxyl group
  C-term hydroxyl group
  modified_base 1..1: /mod_base="OTHER" /note="2'-fluoro-nucleotide"
  misc_feature 1..2: /note="phosphorothioate bond"
  modified_base 2..2: /mod_base="OTHER" /note="2'-fluoro-nucleotide"
  misc_feature 2..3: /note="phosphorothioate bond"
  modified_base 3..3: /mod_base="OTHER" /note="2'-OMe-nucleotide"
  modified_base 4..4: /mod_base="OTHER" /note="2'-fluoro-nucleotide"
  modified_base 5..5: /mod_base="OTHER" /note="2'-OMe-nucleotide"
  modified_base 6..6: /mod_base="OTHER" /note="2'-fluoro-nucleotide"
  modified_base 7..7: /mod_base="OTHER" /note="2'-OMe-nucleotide"
  modified_base 8..8: /mod_base="OTHER" /note="2'-fluoro-nucleotide"
  modified_base 9..9: /mod_base="OTHER" /note="2'-OMe-nucleotide"
  modified_base 10..10: /mod_base="OTHER" /note="2'-OMe-nucleotide"
  modified_base 11..11: /mod_base="OTHER" /note="2'-OMe-nucleotide"
  modified_base 12..12: /mod_base="OTHER" /note="2'-fluoro-nucleotide"
  modified_base 13..13: /mod_base="OTHER" /note="2'-OMe-nucleotide"
  modified_base 14..14: /mod_base="OTHER" /note="2'-fluoro-nucleotide"
  modified_base 15..15: /mod_base="OTHER" /note="2'-OMe-nucleotide"
  modified_base 16..16: /mod_base="OTHER" /note="2'-fluoro-nucleotide"
  modified_base 17..17: /mod_base="OTHER" /note="2'-OMe-nucleotide"
  modified_base 18..18: /mod_base="OTHER" /note="2'-fluoro-nucleotide"
  modified_base 19..19: /mod_base="OTHER" /note="2'-OMe-nucleotide"
  misc_feature 19..20: /note="phosphorothioate bond"
  modified_base 20..20: /mod_base="OTHER" /note="dT"
  misc_feature 20..21: /note="phosphorothioate bond"
  modified_base 21..21: /mod_base="OTHER" /note="dT"
aucaaaugaugaauugucutt

SEQ ID NO: 1050 - RNA, 21 nt, Artificial Sequence
  Description of Artificial Sequence: Synthetic oligonucleotide
  N-term hydroxyl group
  C-term hydroxyl group
  modified_base 1..1: /mod_base="OTHER" /note="2'-OMe-nucleotide"
  misc_feature 1..2: /note="phosphorothioate bond"
  modified_base 2..2: /mod_base="OTHER" /note="2'-fluoro-nucleotide"
  misc_feature 2..3: /note="phosphorothioate bond"
  modified_base 3..3: /mod_base="OTHER" /note="2'-OMe-nucleotide"
  modified_base 4..4: /mod_base="OTHER" /note="2'-fluoro-nucleotide"
  modified_base 5..5: /mod_base="OTHER" /note="2'-OMe-nucleotide"
  modified_base 6..6: /mod_base="OTHER" /note="2'-OMe-nucleotide"
  modified_base 7..7: /mod_base="OTHER" /note="2'-OMe-nucleotide"
  modified_base 8..8: /mod_base="OTHER" /note="2'-OMe-nucleotide"
  modified_base 9..9: /mod_base="OTHER" /note="2'-OMe-nucleotide"
  modified_base 10..10: /mod_base="OTHER" /note="2'-OMe-nucleotide"
  modified_base 11..11: /mod_base="OTHER" /note="2'-OMe-nucleotide"
  modified_base 12..12: /mod_base="OTHER" /note="2'-OMe-nucleotide"
  modified_base 13..13: /mod_base="OTHER" /note="2'-OMe-nucleotide"
  modified_base 14..14: /mod_base="OTHER" /note="2'-fluoro-nucleotide"
  modified_base 15..15: /mod_base="OTHER" /note="2'-OMe-nucleotide"
  modified_base 16..16: /mod_base="OTHER" /note="2'-fluoro-nucleotide"
  modified_base 17..17: /mod_base="OTHER" /note="2'-OMe-nucleotide"
  modified_base 18..18: /mod_base="OTHER" /note="2'-OMe-nucleotide"
  modified_base 19..19: /mod_base="OTHER" /note="2'-OMe-nucleotide"
  misc_feature 19..20: /note="phosphorothioate bond"
  modified_base 20..20: /mod_base="OTHER" /note="2'-OMe-nucleotide"
  misc_feature 20..21: /note="phosphorothioate bond"
  modified_base 21..21: /mod_base="OTHER" /note="2'-OMe-nucleotide"
aucaaaugaugaauugucuaa

SEQ ID NO: 1051 - RNA, 21 nt, Artificial Sequence
  Description of Artificial Sequence: Synthetic oligonucleotide
  N-term hydroxyl group
  C-term hydroxyl group
  modified_base 1..1: /mod_base="OTHER" /note="2'-OMe-nucleotide"
  misc_feature 1..2: /note="phosphorothioate bond"
  modified_base 2..2: /mod_base="OTHER" /note="2'-fluoro-nucleotide"
  misc_feature 2..3: /note="phosphorothioate bond"
  modified_base 3..3: /mod_base="OTHER" /note="2'-OMe-nucleotide"
  modified_base 4..4: /mod_base="OTHER" /note="2'-OMe-nucleotide"
  modified_base 5..5: /mod_base="OTHER" /note="2'-OMe-nucleotide"
  modified_base 6..6: /mod_base="OTHER" /note="2'-fluoro-nucleotide"
  modified_base 7..7: /mod_base="OTHER" /note="2'-OMe-nucleotide"
  modified_base 8..8: /mod_base="OTHER" /note="2'-OMe-nucleotide"
  modified_base 9..9: /mod_base="OTHER" /note="2'-OMe-nucleotide"
  modified_base 10..10: /mod_base="OTHER" /note="2'-OMe-nucleotide"
  modified_base 11..11: /mod_base="OTHER" /note="2'-OMe-nucleotide"
  modified_base 12..12: /mod_base="OTHER" /note="2'-OMe-nucleotide"
  modified_base 13..13: /mod_base="OTHER" /note="2'-OMe-nucleotide"
  modified_base 14..14: /mod_base="OTHER" /note="2'-fluoro-nucleotide"
  modified_base 15..15: /mod_base="OTHER" /note="2'-OMe-nucleotide"
  modified_base 16..16: /mod_base="OTHER" /note="2'-fluoro-nucleotide"
  modified_base 17..17: /mod_base="OTHER" /note="2'-OMe-nucleotide"
  modified_base 18..18: /mod_base="OTHER" /note="2'-OMe-nucleotide"
  modified_base 19..19: /mod_base="OTHER" /note="2'-OMe-nucleotide"
  misc_feature 19..20: /note="phosphorothioate bond"
  modified_base 20..20: /mod_base="OTHER" /note="2'-OMe-nucleotide"
  misc_feature 20..21: /note="phosphorothioate bond"
  modified_base 21..21: /mod_base="OTHER" /note="2'-OMe-nucleotide"
aucaaaugaugaauugucuaa

SEQ ID NO: 1052 - RNA, 21 nt, Artificial Sequence
  Description of Artificial Sequence: Synthetic oligonucleotide
  N-term hydroxyl group
  C-term hydroxyl group
  modified_base 1..1: /mod_base="OTHER" /note="2'-OMe-nucleotide"
  misc_feature 1..2: /note="phosphorothioate bond"
  modified_base 2..2: /mod_base="OTHER" /note="2'-fluoro-nucleotide"
  misc_feature 2..3: /note="phosphorothioate bond"
  modified_base 3..3: /mod_base="OTHER" /note="2'-OMe-nucleotide"
  modified_base 4..4: /mod_base="OTHER" /note="2'-fluoro-nucleotide"
  modified_base 5..5: /mod_base="OTHER" /note="2'-OMe-nucleotide"
  modified_base 6..6: /mod_base="OTHER" /note="2'-OMe-nucleotide"
  modified_base 7..7: /mod_base="OTHER" /note="2'-OMe-nucleotide"
  modified_base 8..8: /mod_base="OTHER" /note="2'-fluoro-nucleotide"
  modified_base 9..9: /mod_base="OTHER" /note="2'-OMe-nucleotide"
  modified_base 10..10: /mod_base="OTHER" /note="2'-OMe-nucleotide"
  modified_base 11..11: /mod_base="OTHER" /note="2'-OMe-nucleotide"
  modified_base 12..12: /mod_base="OTHER" /note="2'-OMe-nucleotide"
  modified_base 13..13: /mod_base="OTHER" /note="2'-OMe-nucleotide"
  modified_base 14..14: /mod_base="OTHER" /note="2'-fluoro-nucleotide"
  modified_base 15..15: /mod_base="OTHER" /note="2'-OMe-nucleotide"
  modified_base 16..16: /mod_base="OTHER" /note="2'-fluoro-nucleotide"
  modified_base 17..17: /mod_base="OTHER" /note="2'-OMe-nucleotide"
  modified_base 18..18: /mod_base="OTHER" /note="2'-OMe-nucleotide"
  modified_base 19..19: /mod_base="OTHER" /note="2'-OMe-nucleotide"
  misc_feature 19..20: /note="phosphorothioate bond"
  modified_base 20..20: /mod_base="OTHER" /note="2'-OMe-nucleotide"
  misc_feature 20..21: /note="phosphorothioate bond"
  modified_base 21..21: /mod_base="OTHER" /note="2'-OMe-nucleotide"
aucaaaugaugaauugucuaa

SEQ ID NO: 1053 - RNA, 21 nt, Artificial Sequence
  Description of Artificial Sequence: Synthetic oligonucleotide
  N-term hydroxyl group
  C-term hydroxyl group
  modified_base 1..1: /mod_base="OTHER" /note="2'-OMe-nucleotide"
  misc_feature 1..2: /note="phosphorothioate bond"
  modified_base 2..2: /mod_base="OTHER" /note="2'-fluoro-nucleotide"
  misc_feature 2..3: /note="phosphorothioate bond"
  modified_base 3..3: /mod_base="OTHER" /note="2'-OMe-nucleotide"
  modified_base 4..4: /mod_base="OTHER" /note="2'-OMe-nucleotide"
  modified_base 5..5: /mod_base="OTHER" /note="2'-OMe-nucleotide"
  modified_base 6..6: /mod_base="OTHER" /note="2'-OMe-nucleotide"
  modified_base 7..7: /mod_base="OTHER" /note="2'-OMe-nucleotide"
  modified_base 8..8: /mod_base="OTHER" /note="2'-fluoro-nucleotide"
  modified_base 9..9: /mod_base="OTHER" /note="2'-OMe-nucleotide"
  modified_base 10..10: /mod_base="OTHER" /note="2'-OMe-nucleotide"
  modified_base 11..11: /mod_base="OTHER" /note="2'-OMe-nucleotide"
  modified_base 12..12: /mod_base="OTHER" /note="2'-OMe-nucleotide"
  modified_base 13..13: /mod_base="OTHER" /note="2'-OMe-nucleotide"
  modified_base 14..14: /mod_base="OTHER" /note="2'-fluoro-nucleotide"
  modified_base 15..15: /mod_base="OTHER" /note="2'-OMe-nucleotide"
  modified_base 16..16: /mod_base="OTHER" /note="2'-fluoro-nucleotide"
  modified_base 17..17: /mod_base="OTHER" /note="2'-OMe-nucleotide"
  modified_base 18..18: /mod_base="OTHER" /note="2'-OMe-nucleotide"
  modified_base 19..19: /mod_base="OTHER" /note="2'-OMe-nucleotide"
  misc_feature 19..20: /note="phosphorothioate bond"
  modified_base 20..20: /mod_base="OTHER" /note="2'-OMe-nucleotide"
  misc_feature 20..21: /note="phosphorothioate bond"
  modified_base 21..21: /mod_base="OTHER" /note="2'-OMe-nucleotide"
aucaaaugaugaauugucuaa

SEQ ID NO: 1054 - DNA, 21 bp, Artificial Sequence
  Description of Artificial Sequence: Synthetic oligonucleotide
  Description of Combined DNA/RNA Molecule: Synthetic oligonucleotide
  N-term hydroxyl group
  C-term hydroxyl group
  modified_base 1..1: /mod_base="OTHER" /note="2'-fluoro-nucleotide"
  misc_feature 1..2: /note="phosphorothioate bond"
  modified_base 2..2: /mod_base="OTHER" /note="2'-fluoro-nucleotide"
  misc_feature 2..3: /note="phosphorothioate bond"
  modified_base 3..3: /mod_base="OTHER" /note="2'-OMe-nucleotide"
  modified_base 4..4: /mod_base="OTHER" /note="2'-fluoro-nucleotide"
  modified_base 5..5: /mod_base="OTHER" /note="2'-OMe-nucleotide"
  modified_base 6..6: /mod_base="OTHER" /note="2'-fluoro-nucleotide"
  modified_base 7..7: /mod_base="OTHER" /note="2'-OMe-nucleotide"
  modified_base 8..8: /mod_base="OTHER" /note="2'-fluoro-nucleotide"
  modified_base 9..9: /mod_base="OTHER" /note="2'-OMe-nucleotide"
  modified_base 10..10: /mod_base="OTHER" /note="2'-OMe-nucleotide"
  modified_base 11..11: /mod_base="OTHER" /note="2'-OMe-nucleotide"
  modified_base 12..12: /mod_base="OTHER" /note="2'-fluoro-nucleotide"
  modified_base 13..13: /mod_base="OTHER" /note="2'-OMe-nucleotide"
  modified_base 14..14: /mod_base="OTHER" /note="2'-fluoro-nucleotide"
  modified_base 15..15: /mod_base="OTHER" /note="2'-OMe-nucleotide"
  modified_base 16..16: /mod_base="OTHER" /note="2'-fluoro-nucleotide"
  modified_base 17..17: /mod_base="OTHER" /note="2'-OMe-nucleotide"
  modified_base 18..18: /mod_base="OTHER" /note="2'-fluoro-nucleotide"
  modified_base 19..19: /mod_base="OTHER" /note="2'-OMe-nucleotide"
  misc_feature 19..20: /note="phosphorothioate bond"
  modified_base 20..20: /mod_base="OTHER" /note="dT"
  misc_feature 20..21: /note="phosphorothioate bond"
  modified_base 21..21: /mod_base="OTHER" /note="dT"
aucaaaugaugaauugucutt

SEQ ID NO: 1055 - RNA, 21 nt, Artificial Sequence
  Description of Artificial Sequence: Synthetic oligonucleotide
  N-term hydroxyl group
  C-term hydroxyl group
  modified_base 1..1: /mod_base="OTHER" /note="2'-OMe-nucleotide"
  misc_feature 1..2: /note="phosphorothioate bond"
  modified_base 2..2: /mod_base="OTHER" /note="2'-fluoro-nucleotide"
  misc_feature 2..3: /note="phosphorothioate bond"
  modified_base 3..3: /mod_base="OTHER" /note="2'-OMe-nucleotide"
  modified_base 4..4: /mod_base="OTHER" /note="2'-fluoro-nucleotide"
  modified_base 5..5: /mod_base="OTHER" /note="2'-OMe-nucleotide"
  modified_base 6..6: /mod_base="OTHER" /note="2'-OMe-nucleotide"
  modified_base 7..7: /mod_base="OTHER" /note="2'-OMe-nucleotide"
  modified_base 8..8: /mod_base="OTHER" /note="2'-OMe-nucleotide"
  modified_base 9..9: /mod_base="OTHER" /note="2'-OMe-nucleotide"
  modified_base 10..10: /mod_base="OTHER" /note="2'-OMe-nucleotide"
  modified_base 11..11: /mod_base="OTHER" /note="2'-OMe-nucleotide"
  modified_base 12..12: /mod_base="OTHER" /note="2'-OMe-nucleotide"
  modified_base 13..13: /mod_base="OTHER" /note="2'-OMe-nucleotide"
  modified_base 14..14: /mod_base="OTHER" /note="2'-fluoro-nucleotide"
  modified_base 15..15: /mod_base="OTHER" /note="2'-OMe-nucleotide"
  modified_base 16..16: /mod_base="OTHER" /note="2'-fluoro-nucleotide"
  modified_base 17..17: /mod_base="OTHER" /note="2'-OMe-nucleotide"
  modified_base 18..18: /mod_base="OTHER" /note="2'-OMe-nucleotide"
  modified_base 19..19: /mod_base="OTHER" /note="2'-OMe-nucleotide"
  misc_feature 19..20: /note="phosphorothioate bond"
  modified_base 20..20: /mod_base="OTHER" /note="2'-OMe-nucleotide"
  misc_feature 20..21: /note="phosphorothioate bond"
  modified_base 21..21: /mod_base="OTHER" /note="2'-OMe-nucleotide"
aucaaaugaugaauugucuaa

SEQ ID NO: 1056 - RNA, 21 nt, Artificial Sequence
  Description of Artificial Sequence: Synthetic oligonucleotide
  N-term hydroxyl group
  C-term hydroxyl group
  modified_base 1..1: /mod_base="OTHER" /note="2'-OMe-nucleotide"
  misc_feature 1..2: /note="phosphorothioate bond"
  modified_base 2..2: /mod_base="OTHER" /note="2'-fluoro-nucleotide"
  misc_feature 2..3: /note="phosphorothioate bond"
  modified_base 3..3: /mod_base="OTHER" /note="2'-OMe-nucleotide"
  modified_base 4..4: /mod_base="OTHER" /note="2'-OMe-nucleotide"
  modified_base 5..5: /mod_base="OTHER" /note="2'-OMe-nucleotide"
  modified_base 6..6: /mod_base="OTHER" /note="2'-fluoro-nucleotide"
  modified_base 7..7: /mod_base="OTHER" /note="2'-OMe-nucleotide"
  modified_base 8..8: /mod_base="OTHER" /note="2'-OMe-nucleotide"
  modified_base 9..9: /mod_base="OTHER" /note="2'-OMe-nucleotide"
  modified_base 10..10: /mod_base="OTHER" /note="2'-OMe-nucleotide"
  modified_base 11..11: /mod_base="OTHER" /note="2'-OMe-nucleotide"
  modified_base 12..12: /mod_base="OTHER" /note="2'-OMe-nucleotide"
  modified_base 13..13: /mod_base="OTHER" /note="2'-OMe-nucleotide"
  modified_base 14..14: /mod_base="OTHER" /note="2'-fluoro-nucleotide"
  modified_base 15..15: /mod_base="OTHER" /note="2'-OMe-nucleotide"
  modified_base 16..16: /mod_base="OTHER" /note="2'-fluoro-nucleotide"
  modified_base 17..17: /mod_base="OTHER" /note="2'-OMe-nucleotide"
  modified_base 18..18: /mod_base="OTHER" /note="2'-OMe-nucleotide"
  modified_base 19..19: /mod_base="OTHER" /note="2'-OMe-nucleotide"
  misc_feature 19..20: /note="phosphorothioate bond"
  modified_base 20..20: /mod_base="OTHER" /note="2'-OMe-nucleotide"
  misc_feature 20..21: /note="phosphorothioate bond"
  modified_base 21..21: /mod_base="OTHER" /note="2'-OMe-nucleotide"
aucaaaugaugaauugucuaa

SEQ ID NO: 1057 - RNA, 21 nt, Artificial Sequence
  Description of Artificial Sequence: Synthetic oligonucleotide
  N-term hydroxyl group
  C-term hydroxyl group
  modified_base 1..1: /mod_base="OTHER" /note="2'-OMe-nucleotide"
  misc_feature 1..2: /note="phosphorothioate bond"
  modified_base 2..2: /mod_base="OTHER" /note="2'-fluoro-nucleotide"
  misc_feature 2..3: /note="phosphorothioate bond"
  modified_base 3..3: /mod_base="OTHER" /note="2'-OMe-nucleotide"
  modified_base 4..4: /mod_base="OTHER" /note="2'-fluoro-nucleotide"
  modified_base 5..5: /mod_base="OTHER" /note="2'-OMe-nucleotide"
  modified_base 6..6: /mod_base="OTHER" /note="2'-OMe-nucleotide"
  modified_base 7..7: /mod_base="OTHER" /note="2'-OMe-nucleotide"
  modified_base 8..8: /mod_base="OTHER" /note="2'-OMe-nucleotide"
  modified_base 9..9: /mod_base="OTHER" /note="2'-fluoro-nucleotide"
  modified_base 10..10: /mod_base="OTHER" /note="2'-OMe-nucleotide"
  modified_base 11..11: /mod_base="OTHER" /note="2'-OMe-nucleotide"
  modified_base 12..12: /mod_base="OTHER" /note="2'-OMe-nucleotide"
  modified_base 13..13: /mod_base="OTHER" /note="2'-OMe-nucleotide"
  modified_base 14..14: /mod_base="OTHER" /note="2'-fluoro-nucleotide"
  modified_base 15..15: /mod_base="OTHER" /note="2'-OMe-nucleotide"
  modified_base 16..16: /mod_base="OTHER" /note="2'-fluoro-nucleotide"
  modified_base 17..17: /mod_base="OTHER" /note="2'-OMe-nucleotide"
  modified_base 18..18: /mod_base="OTHER" /note="2'-OMe-nucleotide"
  modified_base 19..19: /mod_base="OTHER" /note="2'-OMe-nucleotide"
  misc_feature 19..20: /note="phosphorothioate bond"
  modified_base 20..20: /mod_base="OTHER" /note="2'-OMe-nucleotide"
  misc_feature 20..21: /note="phosphorothioate bond"
  modified_base 21..21: /mod_base="OTHER" /note="2'-OMe-nucleotide"
aucaaaugaugaauugucuaa

SEQ ID NO: 1058 - DNA, 21 bp, Artificial Sequence
  Description of Artificial Sequence: Synthetic oligonucleotide
  Description of Combined DNA/RNA Molecule: Synthetic oligonucleotide
  N-term hydroxyl group
  C-term hydroxyl group
  modified_base 1..1: /mod_base="OTHER" /note="2'-fluoro-nucleotide"
  misc_feature 1..2: /note="phosphorothioate bond"
  modified_base 2..2: /mod_base="OTHER" /note="2'-fluoro-nucleotide"
  misc_feature 2..3: /note="phosphorothioate bond"
  modified_base 3..3: /mod_base="OTHER" /note="2'-OMe-nucleotide"
  modified_base 4..4: /mod_base="OTHER" /note="2'-fluoro-nucleotide"
  modified_base 5..5: /mod_base="OTHER" /note="2'-OMe-nucleotide"
  modified_base 6..6: /mod_base="OTHER" /note="2'-fluoro-nucleotide"
  modified_base 7..7: /mod_base="OTHER" /note="2'-OMe-nucleotide"
  modified_base 8..8: /mod_base="OTHER" /note="2'-fluoro-nucleotide"
  modified_base 9..9: /mod_base="OTHER" /note="2'-OMe-nucleotide"
  modified_base 10..10: /mod_base="OTHER" /note="2'-fluoro-nucleotide"
  modified_base 11..11: /mod_base="OTHER" /note="2'-OMe-nucleotide"
  modified_base 12..12: /mod_base="OTHER" /note="2'-OMe-nucleotide"
  modified_base 13..13: /mod_base="OTHER" /note="2'-OMe-nucleotide"
  modified_base 14..14: /mod_base="OTHER" /note="2'-fluoro-nucleotide"
  modified_base 15..15: /mod_base="OTHER" /note="2'-OMe-nucleotide"
  modified_base 16..16: /mod_base="OTHER" /note="2'-fluoro-nucleotide"
  modified_base 17..17: /mod_base="OTHER" /note="2'-OMe-nucleotide"
  modified_base 18..18: /mod_base="OTHER" /note="2'-fluoro-nucleotide"
  modified_base 19..19: /mod_base="OTHER" /note="2'-OMe-nucleotide"
  misc_feature 19..20: /note="phosphorothioate bond"
  modified_base 20..20: /mod_base="OTHER" /note="dT"
  misc_feature 20..21: /note="phosphorothioate bond"
  modified_base 21..21: /mod_base="OTHER" /note="dT"
aucaaaugaugaauugucutt

SEQ ID NO: 1059 - RNA, 21 nt, Artificial Sequence
  Description of Artificial Sequence: Synthetic oligonucleotide
  N-term hydroxyl group
  C-term hydroxyl group
  modified_base 1..1: /mod_base="OTHER" /note="2'-OMe-nucleotide"
  misc_feature 1..2: /note="phosphorothioate bond"
  modified_base 2..2: /mod_base="OTHER" /note="2'-fluoro-nucleotide"
  misc_feature 2..3: /note="phosphorothioate bond"
  modified_base 3..3: /mod_base="OTHER" /note="2'-OMe-nucleotide"
  modified_base 4..4: /mod_base="OTHER" /note="2'-fluoro-nucleotide"
  modified_base 5..5: /mod_base="OTHER" /note="2'-OMe-nucleotide"
  modified_base 6..6: /mod_base="OTHER" /note="2'-OMe-nucleotide"
  modified_base 7..7: /mod_base="OTHER" /note="2'-OMe-nucleotide"
  modified_base 8..8: /mod_base="OTHER" /note="2'-OMe-nucleotide"
  modified_base 9..9: /mod_base="OTHER" /note="2'-OMe-nucleotide"
  modified_base 10..10: /mod_base="OTHER" /note="2'-OMe-nucleotide"
  modified_base 11..11: /mod_base="OTHER" /note="2'-OMe-nucleotide"
  modified_base 12..12: /mod_base="OTHER" /note="2'-OMe-nucleotide"
  modified_base 13..13: /mod_base="OTHER" /note="2'-OMe-nucleotide"
  modified_base 14..14: /mod_base="OTHER" /note="2'-fluoro-nucleotide"
  modified_base 15..15: /mod_base="OTHER" /note="2'-OMe-nucleotide"
  modified_base 16..16: /mod_base="OTHER" /note="2'-fluoro-nucleotide"
  modified_base 17..17: /mod_base="OTHER" /note="2'-OMe-nucleotide"
  modified_base 18..18: /mod_base="OTHER" /note="2'-OMe-nucleotide"
  modified_base 19..19: /mod_base="OTHER" /note="2'-OMe-nucleotide"
  misc_feature 19..20: /note="phosphorothioate bond"
  modified_base 20..20: /mod_base="OTHER" /note="2'-OMe-nucleotide"
  misc_feature 20..21: /note="phosphorothioate bond"
  modified_base 21..21: /mod_base="OTHER" /note="2'-OMe-nucleotide"
aucaaaugaugaauugucuaa

SEQ ID NO: 1060 - RNA, 21 nt, Artificial Sequence
  Description of Artificial Sequence: Synthetic oligonucleotide
  N-term hydroxyl group
  C-term hydroxyl group
  modified_base 1..1: /mod_base="OTHER" /note="2'-OMe-nucleotide"
  misc_feature 1..2: /note="phosphorothioate bond"
  modified_base 2..2: /mod_base="OTHER" /note="2'-fluoro-nucleotide"
  misc_feature 2..3: /note="phosphorothioate bond"
  modified_base 3..3: /mod_base="OTHER" /note="2'-OMe-nucleotide"
  modified_base 4..4: /mod_base="OTHER" /note="2'-OMe-nucleotide"
  modified_base 5..5: /mod_base="OTHER" /note="2'-OMe-nucleotide"
  modified_base 6..6: /mod_base="OTHER" /note="2'-fluoro-nucleotide"
  modified_base 7..7: /mod_base="OTHER" /note="2'-OMe-nucleotide"
  modified_base 8..8: /mod_base="OTHER" /note="2'-OMe-nucleotide"
  modified_base 9..9: /mod_base="OTHER" /note="2'-OMe-nucleotide"
  modified_base 10..10: /mod_base="OTHER" /note="2'-OMe-nucleotide"
  modified_base 11..11: /mod_base="OTHER" /note="2'-OMe-nucleotide"
  modified_base 12..12: /mod_base="OTHER" /note="2'-OMe-nucleotide"
  modified_base 13..13: /mod_base="OTHER" /note="2'-OMe-nucleotide"
  modified_base 14..14: /mod_base="OTHER" /note="2'-fluoro-nucleotide"
  modified_base 15..15: /mod_base="OTHER" /note="2'-OMe-nucleotide"
  modified_base 16..16: /mod_base="OTHER" /note="2'-fluoro-nucleotide"
  modified_base 17..17: /mod_base="OTHER" /note="2'-OMe-nucleotide"
  modified_base 18..18: /mod_base="OTHER" /note="2'-OMe-nucleotide"
  modified_base 19..19: /mod_base="OTHER" /note="2'-OMe-nucleotide"
  misc_feature 19..20: /note="phosphorothioate bond"
  modified_base 20..20: /mod_base="OTHER" /note="2'-OMe-nucleotide"
  misc_feature 20..21: /note="phosphorothioate bond"
  modified_base 21..21: /mod_base="OTHER" /note="2'-OMe-nucleotide"
aucaaaugaugaauugucuaa

SEQ ID NO: 1061 - RNA, 21 nt, Artificial Sequence
  Description of Artificial Sequence: Synthetic oligonucleotide
  N-term hydroxyl group
  C-term hydroxyl group
  modified_base 1..1: /mod_base="OTHER" /note="2'-OMe-nucleotide"
  misc_feature 1..2: /note="phosphorothioate bond"
  modified_base 2..2: /mod_base="OTHER" /note="2'-fluoro-nucleotide"
  misc_feature 2..3: /note="phosphorothioate bond"
  modified_base 3..3: /mod_base="OTHER" /note="2'-OMe-nucleotide"
  modified_base 4..4: /mod_base="OTHER" /note="2'-fluoro-nucleotide"
  modified_base 5..5: /mod_base="OTHER" /note="2'-OMe-nucleotide"
  modified_base 6..6: /mod_base="OTHER" /note="2'-OMe-nucleotide"
  modified_base 7..7: /mod_base="OTHER" /note="2'-OMe-nucleotide"
  modified_base 8..8: /mod_base="OTHER" /note="2'-OMe-nucleotide"
  modified_base 9..9: /mod_base="OTHER" /note="2'-fluoro-nucleotide"
  modified_base 10..10: /mod_base="OTHER" /note="2'-OMe-nucleotide"
  modified_base 11..11: /mod_base="OTHER" /note="2'-OMe-nucleotide"
  modified_base 12..12: /mod_base="OTHER" /note="2'-OMe-nucleotide"
  modified_base 13..13: /mod_base="OTHER" /note="2'-OMe-nucleotide"
  modified_base 14..14: /mod_base="OTHER" /note="2'-fluoro-nucleotide"
  modified_base 15..15: /mod_base="OTHER" /note="2'-OMe-nucleotide"
  modified_base 16..16: /mod_base="OTHER" /note="2'-fluoro-nucleotide"
  modified_base 17..17: /mod_base="OTHER" /note="2'-OMe-nucleotide"
  modified_base 18..18: /mod_base="OTHER" /note="2'-OMe-nucleotide"
  modified_base 19..19: /mod_base="OTHER" /note="2'-OMe-nucleotide"
  misc_feature 19..20: /note="phosphorothioate bond"
  modified_base 20..20: /mod_base="OTHER" /note="2'-OMe-nucleotide"
  misc_feature 20..21: /note="phosphorothioate bond"
  modified_base 21..21: /mod_base="OTHER" /note="2'-OMe-nucleotide"
aucaaaugaugaauugucuaa

SEQ ID NO: 1062 - DNA, 21 bp, Artificial Sequence
  Description of Artificial Sequence: Synthetic oligonucleotide
  Description of Combined DNA/RNA Molecule: Synthetic oligonucleotide
  N-term hydroxyl group
  C-term hydroxyl group
  modified_base 1..1: /mod_base="OTHER" /note="2'-fluoro-nucleotide"
  misc_feature 1..2: /note="phosphorothioate bond"
  modified_base 2..2: /mod_base="OTHER" /note="2'-fluoro-nucleotide"
  misc_feature 2..3: /note="phosphorothioate bond"
  modified_base 3..3: /mod_base="OTHER" /note="2'-OMe-nucleotide"
  modified_base 4..4: /mod_base="OTHER" /note="2'-fluoro-nucleotide"
  modified_base 5..5: /mod_base="OTHER" /note="2'-OMe-nucleotide"
  modified_base 6..6: /mod_base="OTHER" /note="2'-fluoro-nucleotide"
  modified_base 7..7: /mod_base="OTHER" /note="2'-OMe-nucleotide"
  modified_base 8..8: /mod_base="OTHER" /note="2'-fluoro-nucleotide"
  modified_base 9..9: /mod_base="OTHER" /note="2'-OMe-nucleotide"
  modified_base 10..10: /mod_base="OTHER" /note="2'-fluoro-nucleotide"
  modified_base 11..11: /mod_base="OTHER" /note="2'-OMe-nucleotide"
  modified_base 12..12: /mod_base="OTHER" /note="2'-OMe-nucleotide"
  modified_base 13..13: /mod_base="OTHER" /note="2'-OMe-nucleotide"
  modified_base 14..14: /mod_base="OTHER" /note="2'-fluoro-nucleotide"
  modified_base 15..15: /mod_base="OTHER" /note="2'-OMe-nucleotide"
  modified_base 16..16: /mod_base="OTHER" /note="2'-fluoro-nucleotide"
  modified_base 17..17: /mod_base="OTHER" /note="2'-OMe-nucleotide"
  modified_base 18..18: /mod_base="OTHER" /note="2'-fluoro-nucleotide"
  modified_base 19..19: /mod_base="OTHER" /note="2'-OMe-nucleotide"
  misc_feature 19..20: /note="phosphorothioate bond"
  modified_base 20..20: /mod_base="OTHER" /note="dT"
  misc_feature 20..21: /note="phosphorothioate bond"
  modified_base 21..21: /mod_base="OTHER" /note="dT"
aucaaaugaugaauugucutt

SEQ ID NO: 1063 - RNA, 21 nt, Artificial Sequence
  Description of Artificial Sequence: Synthetic oligonucleotide
  N-term hydroxyl group
  C-term hydroxyl group
  modified_base 1..1: /mod_base="OTHER" /note="2'-OMe-nucleotide"
  misc_feature 1..2: /note="phosphorothioate bond"
  modified_base 2..2: /mod_base="OTHER" /note="2'-fluoro-nucleotide"
  misc_feature 2..3: /note="phosphorothioate bond"
  modified_base 3..3: /mod_base="OTHER" /note="2'-OMe-nucleotide"
  modified_base 4..4: /mod_base="OTHER" /note="2'-fluoro-nucleotide"
  modified_base 5..5: /mod_base="OTHER" /note="2'-OMe-nucleotide"
  modified_base 6..6: /mod_base="OTHER" /note="2'-OMe-nucleotide"
  modified_base 7..7: /mod_base="OTHER" /note="2'-OMe-nucleotide"
  modified_base 8..8: /mod_base="OTHER" /note="2'-OMe-nucleotide"
  modified_base 9..9: /mod_base="OTHER" /note="2'-OMe-nucleotide"
  modified_base 10..10: /mod_base="OTHER" /note="2'-OMe-nucleotide"
  modified_base 11..11: /mod_base="OTHER" /note="2'-OMe-nucleotide"
  modified_base 12..12: /mod_base="OTHER" /note="2'-OMe-nucleotide"
  modified_base 13..13: /mod_base="OTHER" /note="2'-OMe-nucleotide"
  modified_base 14..14: /mod_base="OTHER" /note="2'-fluoro-nucleotide"
  modified_base 15..15: /mod_base="OTHER" /note="2'-OMe-nucleotide"
  modified_base 16..16: /mod_base="OTHER" /note="2'-fluoro-nucleotide"
  modified_base 17..17: /mod_base="OTHER" /note="2'-OMe-nucleotide"
  modified_base 18..18: /mod_base="OTHER" /note="2'-OMe-nucleotide"
  modified_base 19..19: /mod_base="OTHER" /note="2'-OMe-nucleotide"
  misc_feature 19..20: /note="phosphorothioate bond"
  modified_base 20..20: /mod_base="OTHER" /note="2'-OMe-nucleotide"
  misc_feature 20..21: /note="phosphorothioate bond"
  modified_base 21..21: /mod_base="OTHER" /note="2'-OMe-nucleotide"
aucaaaugaugaauugucuaa

SEQ ID NO: 1064 - RNA, 21 nt, Artificial Sequence
  Description of Artificial Sequence: Synthetic oligonucleotide
  N-term hydroxyl group
  C-term hydroxyl group
  modified_base 1..1: /mod_base="OTHER" /note="2'-OMe-nucleotide"
  misc_feature 1..2: /note="phosphorothioate bond"
  modified_base 2..2: /mod_base="OTHER" /note="2'-fluoro-nucleotide"
  misc_feature 2..3: /note="phosphorothioate bond"
  modified_base 3..3: /mod_base="OTHER" /note="2'-OMe-nucleotide"
  modified_base 4..4: /mod_base="OTHER" /note="2'-OMe-nucleotide"
  modified_base 5..5: /mod_base="OTHER" /note="2'-OMe-nucleotide"
  modified_base 6..6: /mod_base="OTHER" /note="2'-fluoro-nucleotide"
  modified_base 7..7: /mod_base="OTHER" /note="2'-OMe-nucleotide"
  modified_base 8..8: /mod_base="OTHER" /note="2'-OMe-nucleotide"
  modified_base 9..9: /mod_base="OTHER" /note="2'-OMe-nucleotide"
  modified_base 10..10: /mod_base="OTHER" /note="2'-OMe-nucleotide"
  modified_base 11..11: /mod_base="OTHER" /note="2'-OMe-nucleotide"
  modified_base 12..12: /mod_base="OTHER" /note="2'-OMe-nucleotide"
  modified_base 13..13: /mod_base="OTHER" /note="2'-OMe-nucleotide"
  modified_base 14..14: /mod_base="OTHER" /note="2'-fluoro-nucleotide"
  modified_base 15..15: /mod_base="OTHER" /note="2'-OMe-nucleotide"
  modified_base 16..16: /mod_base="OTHER" /note="2'-fluoro-nucleotide"
  modified_base 17..17: /mod_base="OTHER" /note="2'-OMe-nucleotide"
  modified_base 18..18: /mod_base="OTHER" /note="2'-OMe-nucleotide"
  modified_base 19..19: /mod_base="OTHER" /note="2'-OMe-nucleotide"
  misc_feature 19..20: /note="phosphorothioate bond"
  modified_base 20..20: /mod_base="OTHER" /note="2'-OMe-nucleotide"
  misc_feature 20..21: /note="phosphorothioate bond"
  modified_base 21..21: /mod_base="OTHER" /note="2'-OMe-nucleotide"
aucaaaugaugaauugucuaa

SEQ ID NO: 1065 - RNA, 21 nt, Artificial Sequence
  Description of Artificial Sequence: Synthetic oligonucleotide
  N-term hydroxyl group
  C-term hydroxyl group
  modified_base 1..1: /mod_base="OTHER" /note="2'-OMe-nucleotide"
  misc_feature 1..2: /note="phosphorothioate bond"
  modified_base 2..2: /mod_base="OTHER" /note="2'-fluoro-nucleotide"
  misc_feature 2..3: /note="phosphorothioate bond"
  modified_base 3..3: /mod_base="OTHER" /note="2'-OMe-nucleotide"
  modified_base 4..4: /mod_base="OTHER" /note="2'-fluoro-nucleotide"
  modified_base 5..5: /mod_base="OTHER" /note="2'-OMe-nucleotide"
  modified_base 6..6: /mod_base="OTHER" /note="2'-OMe-nucleotide"
  modified_base 7..7: /mod_base="OTHER" /note="2'-OMe-nucleotide"
  modified_base 8..8: /mod_base="OTHER" /note="2'-fluoro-nucleotide"
  modified_base 9..9: /mod_base="OTHER" /note="2'-OMe-nucleotide"
  modified_base 10..10: /mod_base="OTHER" /note="2'-OMe-nucleotide"
  modified_base 11..11: /mod_base="OTHER" /note="2'-OMe-nucleotide"
  modified_base 12..12: /mod_base="OTHER" /note="2'-OMe-nucleotide"
  modified_base 13..13: /mod_base="OTHER" /note="2'-OMe-nucleotide"
  modified_base 14..14: /mod_base="OTHER" /note="2'-fluoro-nucleotide"
  modified_base 15..15: /mod_base="OTHER" /note="2'-OMe-nucleotide"
  modified_base 16..16: /mod_base="OTHER" /note="2'-fluoro-nucleotide"
  modified_base 17..17: /mod_base="OTHER" /note="2'-OMe-nucleotide"
  modified_base 18..18: /mod_base="OTHER" /note="2'-OMe-nucleotide"
  modified_base 19..19: /mod_base="OTHER" /note="2'-OMe-nucleotide"
  misc_feature 19..20: /note="phosphorothioate bond"
  modified_base 20..20: /mod_base="OTHER" /note="2'-OMe-nucleotide"
  misc_feature 20..21: /note="phosphorothioate bond"
  modified_base 21..21: /mod_base="OTHER" /note="2'-OMe-nucleotide"
aucaaaugaugaauugucuaa

SEQ ID NO: 1066 - RNA, 21 nt, Artificial Sequence
  Description of Artificial Sequence: Synthetic oligonucleotide
  N-term hydroxyl group
  C-term hydroxyl group
  modified_base 1..1: /mod_base="OTHER" /note="2'-OMe-nucleotide"
  misc_feature 1..2: /note="phosphorothioate bond"
  modified_base 2..2: /mod_base="OTHER" /note="2'-fluoro-nucleotide"
  misc_feature 2..3: /note="phosphorothioate bond"
  modified_base 3..3: /mod_base="OTHER" /note="2'-OMe-nucleotide"
  modified_base 4..4: /mod_base="OTHER" /note="2'-OMe-nucleotide"
  modified_base 5..5: /mod_base="OTHER" /note="2'-OMe-nucleotide"
  modified_base 6..6: /mod_base="OTHER" /note="2'-OMe-nucleotide"
  modified_base 7..7: /mod_base="OTHER" /note="2'-OMe-nucleotide"
  modified_base 8..8: /mod_base="OTHER" /note="2'-fluoro-nucleotide"
  modified_base 9..9: /mod_base="OTHER" /note="2'-OMe-nucleotide"
  modified_base 10..10: /mod_base="OTHER" /note="2'-OMe-nucleotide"
  modified_base 11..11: /mod_base="OTHER" /note="2'-OMe-nucleotide"
  modified_base 12..12: /mod_base="OTHER" /note="2'-OMe-nucleotide"
  modified_base 13..13: /mod_base="OTHER" /note="2'-OMe-nucleotide"
  modified_base 14..14: /mod_base="OTHER" /note="2'-fluoro-nucleotide"
  modified_base 15..15: /mod_base="OTHER" /note="2'-OMe-nucleotide"
  modified_base 16..16: /mod_base="OTHER" /note="2'-fluoro-nucleotide"
  modified_base 17..17: /mod_base="OTHER" /note="2'-OMe-nucleotide"
  modified_base 18..18: /mod_base="OTHER" /note="2'-OMe-nucleotide"
  modified_base 19..19: /mod_base="OTHER" /note="2'-OMe-nucleotide"
  misc_feature 19..20: /note="phosphorothioate bond"
  modified_base 20..20: /mod_base="OTHER" /note="2'-OMe-nucleotide"
  misc_feature 20..21: /note="phosphorothioate bond"
  modified_base 21..21: /mod_base="OTHER" /note="2'-OMe-nucleotide"
aucaaaugaugaauugucuaa

SEQ ID NO: 1067 - DNA, 21 bp, Artificial Sequence
  Description of Artificial Sequence: Synthetic oligonucleotide
  Description of Combined DNA/RNA Molecule: Synthetic oligonucleotide
  N-term hydroxyl group
  C-term hydroxyl group
  modified_base 1..1: /mod_base="OTHER" /note="2'-fluoro-nucleotide"
  misc_feature 1..2: /note="phosphorothioate bond"
  modified_base 2..2: /mod_base="OTHER" /note="2'-fluoro-nucleotide"
  misc_feature 2..3: /note="phosphorothioate bond"
  modified_base 3..3: /mod_base="OTHER" /note="2'-OMe-nucleotide"
  modified_base 4..4: /mod_base="OTHER" /note="2'-fluoro-nucleotide"
  modified_base 5..5: /mod_base="OTHER" /note="2'-OMe-nucleotide"
  modified_base 6..6: /mod_base="OTHER" /note="2'-fluoro-nucleotide"
  modified_base 7..7: /mod_base="OTHER" /note="2'-OMe-nucleotide"
  modified_base 8..8: /mod_base="OTHER" /note="2'-fluoro-nucleotide"
  modified_base 9..9: /mod_base="OTHER" /note="2'-OMe-nucleotide"
  modified_base 10..10: /mod_base="OTHER" /note="2'-OMe-nucleotide"
  modified_base 11..11: /mod_base="OTHER" /note="2'-OMe-nucleotide"
  modified_base 12..12: /mod_base="OTHER" /note="2'-fluoro-nucleotide"
  modified_base 13..13: /mod_base="OTHER" /note="2'-OMe-nucleotide"
  modified_base 14..14: /mod_base="OTHER" /note="2'-fluoro-nucleotide"
  modified_base 15..15: /mod_base="OTHER" /note="2'-OMe-nucleotide"
  modified_base 16..16: /mod_base="OTHER" /note="2'-fluoro-nucleotide"
  modified_base 17..17: /mod_base="OTHER" /note="2'-OMe-nucleotide"
  modified_base 18..18: /mod_base="OTHER" /note="2'-fluoro-nucleotide"
  modified_base 19..19: /mod_base="OTHER" /note="2'-OMe-nucleotide"
  misc_feature 19..20: /note="phosphorothioate bond"
  modified_base 20..20: /mod_base="OTHER" /note="dT"
  misc_feature 20..21: /note="phosphorothioate bond"
  modified_base 21..21: /mod_base="OTHER" /note="dT"
aucaaaugaugaauugucutt

SEQ ID NO: 1068 - RNA, 21 nt, Artificial Sequence
  Description of Artificial Sequence: Synthetic oligonucleotide
  N-term hydroxyl group
  C-term hydroxyl group
  modified_base 1..1: /mod_base="OTHER" /note="2'-OMe-nucleotide"
  misc_feature 1..2: /note="phosphorothioate bond"
  modified_base 2..2: /mod_base="OTHER" /note="2'-fluoro-nucleotide"
  misc_feature 2..3: /note="phosphorothioate bond"
  modified_base 3..3: /mod_base="OTHER" /note="2'-OMe-nucleotide"
  modified_base 4..4: /mod_base="OTHER" /note="2'-fluoro-nucleotide"
  modified_base 5..5: /mod_base="OTHER" /note="2'-OMe-nucleotide"
  modified_base 6..6: /mod_base="OTHER" /note="2'-OMe-nucleotide"
  modified_base 7..7: /mod_base="OTHER" /note="2'-OMe-nucleotide"
  modified_base 8..8: /mod_base="OTHER" /note="2'-OMe-nucleotide"
  modified_base 9..9: /mod_base="OTHER" /note="2'-OMe-nucleotide"
  modified_base 10..10: /mod_base="OTHER" /note="2'-OMe-nucleotide"
  modified_base 11..11: /mod_base="OTHER" /note="2'-OMe-nucleotide"
  modified_base 12..12: /mod_base="OTHER" /note="2'-OMe-nucleotide"
  modified_base 13..13: /mod_base="OTHER" /note="2'-OMe-nucleotide"
  modified_base 14..14: /mod_base="OTHER" /note="2'-fluoro-nucleotide"
  modified_base 15..15: /mod_base="OTHER" /note="2'-OMe-nucleotide"
  modified_base 16..16: /mod_base="OTHER" /note="2'-fluoro-nucleotide"
  modified_base 17..17: /mod_base="OTHER" /note="2'-OMe-nucleotide"
  modified_base 18..18: /mod_base="OTHER" /note="2'-OMe-nucleotide"
  modified_base 19..19: /mod_base="OTHER" /note="2'-OMe-nucleotide"
  misc_feature 19..20: /note="phosphorothioate bond"
  modified_base 20..20: /mod_base="OTHER" /note="2'-OMe-nucleotide"
  misc_feature 20..21: /note="phosphorothioate bond"
  modified_base 21..21: /mod_base="OTHER" /note="2'-OMe-nucleotide"
aucaaaugaugaauugucuaa

SEQ ID NO: 1069 - RNA, 21 nt, Artificial Sequence
  Description of Artificial Sequence: Synthetic oligonucleotide
  N-term hydroxyl group
  C-term hydroxyl group
  modified_base 1..1: /mod_base="OTHER" /note="2'-OMe-nucleotide"
  misc_feature 1..2: /note="phosphorothioate bond"
  modified_base 2..2: /mod_base="OTHER" /note="2'-fluoro-nucleotide"
  misc_feature 2..3: /note="phosphorothioate bond"
  modified_base 3..3: /mod_base="OTHER" /note="2'-OMe-nucleotide"
  modified_base 4..4: /mod_base="OTHER" /note="2'-OMe-nucleotide"
  modified_base 5..5: /mod_base="OTHER" /note="2'-OMe-nucleotide"
  modified_base 6..6: /mod_base="OTHER" /note="2'-fluoro-nucleotide"
  modified_base 7..7: /mod_base="OTHER" /note="2'-OMe-nucleotide"
  modified_base 8..8: /mod_base="OTHER" /note="2'-OMe-nucleotide"
  modified_base 9..9: /mod_base="OTHER" /note="2'-OMe-nucleotide"
  modified_base 10..10: /mod_base="OTHER" /note="2'-OMe-nucleotide"
  modified_base 11..11: /mod_base="OTHER" /note="2'-OMe-nucleotide"
  modified_base 12..12: /mod_base="OTHER" /note="2'-OMe-nucleotide"
  modified_base 13..13: /mod_base="OTHER" /note="2'-OMe-nucleotide"
  modified_base 14..14: /mod_base="OTHER" /note="2'-fluoro-nucleotide"
  modified_base 15..15: /mod_base="OTHER" /note="2'-OMe-nucleotide"
  modified_base 16..16: /mod_base="OTHER" /note="2'-fluoro-nucleotide"
  modified_base 17..17: /mod_base="OTHER" /note="2'-OMe-nucleotide"
  modified_base 18..18: /mod_base="OTHER" /note="2'-OMe-nucleotide"
  modified_base 19..19: /mod_base="OTHER" /note="2'-OMe-nucleotide"
  misc_feature 19..20: /note="phosphorothioate bond"
  modified_base 20..20: /mod_base="OTHER" /note="2'-OMe-nucleotide"
  misc_feature 20..21: /note="phosphorothioate bond"
  modified_base 21..21: /mod_base="OTHER" /note="2'-OMe-nucleotide"
aucaaaugaugaauugucuaa

SEQ ID NO: 1070 - RNA, 21 nt, Artificial Sequence
  Description of Artificial Sequence: Synthetic oligonucleotide
  N-term hydroxyl group
  C-term hydroxyl group
  modified_base 1..1: /mod_base="OTHER" /note="2'-OMe-nucleotide"
  misc_feature 1..2: /note="phosphorothioate bond"
  modified_base 2..2: /mod_base="OTHER" /note="2'-fluoro-nucleotide"
  misc_feature 2..3: /note="phosphorothioate bond"
  modified_base 3..3: /mod_base="OTHER" /note="2'-OMe-nucleotide"
  modified_base 4..4: /mod_base="OTHER" /note="2'-fluoro-nucleotide"
  modified_base 5..5: /mod_base="OTHER" /note="2'-OMe-nucleotide"
  modified_base 6..6: /mod_base="OTHER" /note="2'-OMe-nucleotide"
  modified_base 7..7: /mod_base="OTHER" /note="2'-OMe-nucleotide"
  modified_base 8..8: /mod_base="OTHER" /note="2'-fluoro-nucleotide"
  modified_base 9..9: /mod_base="OTHER" /note="2'-OMe-nucleotide"
  modified_base 10..10: /mod_base="OTHER" /note="2'-OMe-nucleotide"
  modified_base 11..11: /mod_base="OTHER" /note="2'-OMe-nucleotide"
  modified_base 12..12: /mod_base="OTHER" /note="2'-OMe-nucleotide"
  modified_base 13..13: /mod_base="OTHER" /note="2'-OMe-nucleotide"
  modified_base 14..14: /mod_base="OTHER" /note="2'-fluoro-nucleotide"
  modified_base 15..15: /mod_base="OTHER" /note="2'-OMe-nucleotide"
  modified_base 16..16: /mod_base="OTHER" /note="2'-fluoro-nucleotide"
  modified_base 17..17: /mod_base="OTHER" /note="2'-OMe-nucleotide"
  modified_base 18..18: /mod_base="OTHER" /note="2'-OMe-nucleotide"
  modified_base 19..19: /mod_base="OTHER" /note="2'-OMe-nucleotide"
  misc_feature 19..20: /note="phosphorothioate bond"
  modified_base 20..20: /mod_base="OTHER" /note="2'-OMe-nucleotide"
  misc_feature 20..21: /note="phosphorothioate bond"
  modified_base 21..21: /mod_base="OTHER" /note="2'-OMe-nucleotide"
aucaaaugaugaauugucuaa

SEQ ID NO: 1071 - RNA, 21 nt, Artificial Sequence
  Description of Artificial Sequence: Synthetic oligonucleotide
  N-term hydroxyl group
  C-term hydroxyl group
  modified_base 1..1: /mod_base="OTHER" /note="2'-OMe-nucleotide"
  misc_feature 1..2: /note="phosphorothioate bond"
  modified_base 2..2: /mod_base="OTHER" /note="2'-fluoro-nucleotide"
  misc_feature 2..3: /note="phosphorothioate bond"
  modified_base 3..3: /mod_base="OTHER" /note="2'-OMe-nucleotide"
  modified_base 4..4: /mod_base="OTHER" /note="2'-OMe-nucleotide"
  modified_base 5..5: /mod_base="OTHER" /note="2'-OMe-nucleotide"
  modified_base 6..6: /mod_base="OTHER" /note="2'-OMe-nucleotide"
  modified_base 7..7: /mod_base="OTHER" /note="2'-OMe-nucleotide"
  modified_base 8..8: /mod_base="OTHER" /note="2'-fluoro-nucleotide"
  modified_base 9..9: /mod_base="OTHER" /note="2'-OMe-nucleotide"
  modified_base 10..10: /mod_base="OTHER" /note="2'-OMe-nucleotide"
  modified_base 11..11: /mod_base="OTHER" /note="2'-OMe-nucleotide"
  modified_base 12..12: /mod_base="OTHER" /note="2'-OMe-nucleotide"
  modified_base 13..13: /mod_base="OTHER" /note="2'-OMe-nucleotide"
  modified_base 14..14: /mod_base="OTHER" /note="2'-fluoro-nucleotide"
  modified_base 15..15: /mod_base="OTHER" /note="2'-OMe-nucleotide"
  modified_base 16..16: /mod_base="OTHER" /note="2'-fluoro-nucleotide"
  modified_base 17..17: /mod_base="OTHER" /note="2'-OMe-nucleotide"
  modified_base 18..18: /mod_base="OTHER" /note="2'-OMe-nucleotide"
  modified_base 19..19: /mod_base="OTHER" /note="2'-OMe-nucleotide"
  misc_feature 19..20: /note="phosphorothioate bond"
  modified_base 20..20: /mod_base="OTHER" /note="2'-OMe-nucleotide"
  misc_feature 20..21: /note="phosphorothioate bond"
  modified_base 21..21: /mod_base="OTHER" /note="2'-OMe-nucleotide"
aucaaaugaugaauugucuaa

SEQ ID NO: 1072 - DNA, 21 bp, Artificial Sequence
  Description of Artificial Sequence: Synthetic oligonucleotide
  Description of Combined DNA/RNA Molecule: Synthetic oligonucleotide
  N-term hydroxyl group
  C-term hydroxyl group
  modified_base 1..1: /mod_base="OTHER" /note="2'-fluoro-nucleotide"
  misc_feature 1..2: /note="phosphorothioate bond"
  modified_base 2..2: /mod_base="OTHER" /note="2'-fluoro-nucleotide"
  misc_feature 2..3: /note="phosphorothioate bond"
  modified_base 3..3: /mod_base="OTHER" /note="2'-OMe-nucleotide"
  modified_base 4..4: /mod_base="OTHER" /note="2'-fluoro-nucleotide"
  modified_base 5..5: /mod_base="OTHER" /note="2'-OMe-nucleotide"
  modified_base 6..6: /mod_base="OTHER" /note="2'-fluoro-nucleotide"
  modified_base 7..7: /mod_base="OTHER" /note="2'-OMe-nucleotide"
  modified_base 8..8: /mod_base="OTHER" /note="2'-fluoro-nucleotide"
  modified_base 9..9: /mod_base="OTHER" /note="2'-OMe-nucleotide"
  modified_base 10..10: /mod_base="OTHER" /note="2'-OMe-nucleotide"
  modified_base 11..11: /mod_base="OTHER" /note="2'-OMe-nucleotide"
  modified_base 12..12: /mod_base="OTHER" /note="2'-fluoro-nucleotide"
  modified_base 13..13: /mod_base="OTHER" /note="2'-OMe-nucleotide"
  modified_base 14..14: /mod_base="OTHER" /note="2'-fluoro-nucleotide"
  modified_base 15..15: /mod_base="OTHER" /note="2'-OMe-nucleotide"
  modified_base 16..16: /mod_base="OTHER" /note="2'-fluoro-nucleotide"
  modified_base 17..17: /mod_base="OTHER" /note="2'-OMe-nucleotide"
  modified_base 18..18: /mod_base="OTHER" /note="2'-fluoro-nucleotide"
  modified_base 19..19: /mod_base="OTHER" /note="2'-OMe-nucleotide"
  misc_feature 19..20: /note="phosphorothioate bond"
  modified_base 20..20: /mod_base="OTHER" /note="dT"
  misc_feature 20..21: /note="phosphorothioate bond"
  modified_base 21..21: /mod_base="OTHER" /note="dT"
aucaaaugaugaauugucutt

SEQ ID NO: 1073 - RNA, 21 nt, Artificial Sequence
  Description of Artificial Sequence: Synthetic oligonucleotide
  N-term hydroxyl group
  C-term hydroxyl group
  modified_base 1..1: /mod_base="OTHER" /note="2'-OMe-nucleotide"
  misc_feature 1..2: /note="phosphorothioate bond"
  modified_base 2..2: /mod_base="OTHER" /note="2'-fluoro-nucleotide"
  misc_feature 2..3: /note="phosphorothioate bond"
  modified_base 3..3: /mod_base="OTHER" /note="2'-OMe-nucleotide"
  modified_base 4..4: /mod_base="OTHER" /note="2'-fluoro-nucleotide"
  modified_base 5..5: /mod_base="OTHER" /note="2'-OMe-nucleotide"
  modified_base 6..6: /mod_base="OTHER" /note="2'-OMe-nucleotide"
  modified_base 7..7: /mod_base="OTHER" /note="2'-OMe-nucleotide"
  modified_base 8..8: /mod_base="OTHER" /note="2'-OMe-nucleotide"
  modified_base 9..9: /mod_base="OTHER" /note="2'-OMe-nucleotide"
  modified_base 10..10: /mod_base="OTHER" /note="2'-OMe-nucleotide"
  modified_base 11..11: /mod_base="OTHER" /note="2'-OMe-nucleotide"
  modified_base 12..12: /mod_base="OTHER" /note="2'-OMe-nucleotide"
  modified_base 13..13: /mod_base="OTHER" /note="2'-OMe-nucleotide"
  modified_base 14..14: /mod_base="OTHER" /note="2'-fluoro-nucleotide"
  modified_base 15..15: /mod_base="OTHER" /note="2'-OMe-nucleotide"
  modified_base 16..16: /mod_base="OTHER" /note="2'-fluoro-nucleotide"
  modified_base 17..17: /mod_base="OTHER" /note="2'-OMe-nucleotide"
  modified_base 18..18: /mod_base="OTHER" /note="2'-OMe-nucleotide"
  modified_base 19..19: /mod_base="OTHER" /note="2'-OMe-nucleotide"
  misc_feature 19..20: /note="phosphorothioate bond"
  modified_base 20..20: /mod_base="OTHER" /note="2'-OMe-nucleotide"
  misc_feature 20..21: /note="phosphorothioate bond"
  modified_base 21..21: /mod_base="OTHER" /note="2'-OMe-nucleotide"
ucucuuaaggauuuaauacaa

SEQ ID NO: 1074 - RNA, 21 nt, Artificial Sequence
  Description of Artificial Sequence: Synthetic oligonucleotide
  N-term hydroxyl group
  C-term hydroxyl group
  modified_base 1..1: /mod_base="OTHER" /note="2'-OMe-nucleotide"
  misc_feature 1..2: /note="phosphorothioate bond"
  modified_base 2..2: /mod_base="OTHER" /note="2'-fluoro-nucleotide"
  misc_feature 2..3: /note="phosphorothioate bond"
  modified_base 3..3: /mod_base="OTHER" /note="2'-OMe-nucleotide"
  modified_base 4..4: /mod_base="OTHER" /note="2'-OMe-nucleotide"
  modified_base 5..5: /mod_base="OTHER" /note="2'-OMe-nucleotide"
  modified_base 6..6: /mod_base="OTHER" /note="2'-fluoro-nucleotide"
  modified_base 7..7: /mod_base="OTHER" /note="2'-OMe-nucleotide"
  modified_base 8..8: /mod_base="OTHER" /note="2'-OMe-nucleotide"
  modified_base 9..9: /mod_base="OTHER" /note="2'-OMe-nucleotide"
  modified_base 10..10: /mod_base="OTHER" /note="2'-OMe-nucleotide"
  modified_base 11..11: /mod_base="OTHER" /note="2'-OMe-nucleotide"
  modified_base 12..12: /mod_base="OTHER" /note="2'-OMe-nucleotide"
  modified_base 13..13: /mod_base="OTHER" /note="2'-OMe-nucleotide"
  modified_base 14..14: /mod_base="OTHER" /note="2'-fluoro-nucleotide"
  modified_base 15..15: /mod_base="OTHER" /note="2'-OMe-nucleotide"
  modified_base 16..16: /mod_base="OTHER" /note="2'-fluoro-nucleotide"
  modified_base 17..17: /mod_base="OTHER" /note="2'-OMe-nucleotide"
  modified_base 18..18: /mod_base="OTHER" /note="2'-OMe-nucleotide"
  modified_base 19..19: /mod_base="OTHER" /note="2'-OMe-nucleotide"
  misc_feature 19..20: /note="phosphorothioate bond"
  modified_base 20..20: /mod_base="OTHER" /note="2'-OMe-nucleotide"
  misc_feature 20..21: /note="phosphorothioate bond"
  modified_base 21..21: /mod_base="OTHER" /note="2'-OMe-nucleotide"
ucucuuaaggauuuaauacaa

SEQ ID NO: 1075 - RNA, 21 nt, Artificial Sequence
  Description of Artificial Sequence: Synthetic oligonucleotide
  N-term hydroxyl group
  C-term hydroxyl group
  modified_base 1..1: /mod_base="OTHER" /note="2'-OMe-nucleotide"
  misc_feature 1..2: /note="phosphorothioate bond"
  modified_base 2..2: /mod_base="OTHER" /note="2'-fluoro-nucleotide"
  misc_feature 2..3: /note="phosphorothioate bond"
  modified_base 3..3: /mod_base="OTHER" /note="2'-OMe-nucleotide"
  modified_base 4..4: /mod_base="OTHER" /note="2'-fluoro-nucleotide"
  modified_base 5..5: /mod_base="OTHER" /note="2'-OMe-nucleotide"
  modified_base 6..6: /mod_base="OTHER" /note="2'-OMe-nucleotide"
  modified_base 7..7: /mod_base="OTHER" /note="2'-OMe-nucleotide"
  modified_base 8..8: /mod_base="OTHER" /note="2'-OMe-nucleotide"
  modified_base 9..9: /mod_base="OTHER" /note="2'-fluoro-nucleotide"
  modified_base 10..10: /mod_base="OTHER" /note="2'-OMe-nucleotide"
  modified_base 11..11: /mod_base="OTHER" /note="2'-OMe-nucleotide"
  modified_base 12..12: /mod_base="OTHER" /note="2'-OMe-nucleotide"
  modified_base 13..13: /mod_base="OTHER" /note="2'-OMe-nucleotide"
  modified_base 14..14: /mod_base="OTHER" /note="2'-fluoro-nucleotide"
  modified_base 15..15: /mod_base="OTHER" /note="2'-OMe-nucleotide"
  modified_base 16..16: /mod_base="OTHER" /note="2'-fluoro-nucleotide"
  modified_base 17..17: /mod_base="OTHER" /note="2'-OMe-nucleotide"
  modified_base 18..18: /mod_base="OTHER" /note="2'-OMe-nucleotide"
  modified_base 19..19: /mod_base="OTHER" /note="2'-OMe-nucleotide"
  misc_feature 19..20: /note="phosphorothioate bond"
  modified_base 20..20: /mod_base="OTHER" /note="2'-OMe-nucleotide"
  misc_feature 20..21: /note="phosphorothioate bond"
  modified_base 21..21: /mod_base="OTHER" /note="2'-OMe-nucleotide"
ucucuuaaggauuuaauacaa

SEQ ID NO: 1076 - DNA, 21 bp, Artificial Sequence
  Description of Artificial Sequence: Synthetic oligonucleotide
  Description of Combined DNA/RNA Molecule: Synthetic oligonucleotide
  N-term hydroxyl group
  C-term hydroxyl group
  modified_base 1..1: /mod_base="OTHER" /note="2'-fluoro-nucleotide"
  misc_feature 1..2: /note="phosphorothioate bond"
  modified_base 2..2: /mod_base="OTHER" /note="2'-fluoro-nucleotide"
  misc_feature 2..3: /note="phosphorothioate bond"
  modified_base 3..3: /mod_base="OTHER" /note="2'-OMe-nucleotide"
  modified_base 4..4: /mod_base="OTHER" /note="2'-fluoro-nucleotide"
  modified_base 5..5: /mod_base="OTHER" /note="2'-OMe-nucleotide"
  modified_base 6..6: /mod_base="OTHER" /note="2'-fluoro-nucleotide"
  modified_base 7..7: /mod_base="OTHER" /note="2'-OMe-nucleotide"
  modified_base 8..8: /mod_base="OTHER" /note="2'-fluoro-nucleotide"
  modified_base 9..9: /mod_base="OTHER" /note="2'-OMe-nucleotide"
  modified_base 10..10: /mod_base="OTHER" /note="2'-fluoro-nucleotide"
  modified_base 11..11: /mod_base="OTHER" /note="2'-OMe-nucleotide"
  modified_base 12..12: /mod_base="OTHER" /note="2'-OMe-nucleotide"
  modified_base 13..13: /mod_base="OTHER" /note="2'-OMe-nucleotide"
  modified_base 14..14: /mod_base="OTHER" /note="2'-fluoro-nucleotide"
  modified_base 15..15: /mod_base="OTHER" /note="2'-OMe-nucleotide"
  modified_base 16..16: /mod_base="OTHER" /note="2'-fluoro-nucleotide"
  modified_base 17..17: /mod_base="OTHER" /note="2'-OMe-nucleotide"
  modified_base 18..18: /mod_base="OTHER" /note="2'-fluoro-nucleotide"
  modified_base 19..19: /mod_base="OTHER" /note="2'-OMe-nucleotide"
  misc_feature 19..20: /note="phosphorothioate bond"
  modified_base 20..20: /mod_base="OTHER" /note="dT"
  misc_feature 20..21: /note="phosphorothioate bond"
  modified_base 21..21: /mod_base="OTHER" /note="dT"
ucucuuaaggauuuaauactt

SEQ ID NO: 1077 - RNA, 21 nt, Artificial Sequence
  Description of Artificial Sequence: Synthetic oligonucleotide
  N-term hydroxyl group
  C-term hydroxyl group
  modified_base 1..1: /mod_base="OTHER" /note="2'-OMe-nucleotide"
  misc_feature 1..2: /note="phosphorothioate bond"
  modified_base 2..2: /mod_base="OTHER" /note="2'-fluoro-nucleotide"
  misc_feature 2..3: /note="phosphorothioate bond"
  modified_base 3..3: /mod_base="OTHER" /note="2'-OMe-nucleotide"
  modified_base 4..4: /mod_base="OTHER" /note="2'-fluoro-nucleotide"
  modified_base 5..5: /mod_base="OTHER" /note="2'-OMe-nucleotide"
  modified_base 6..6: /mod_base="OTHER" /note="2'-OMe-nucleotide"
  modified_base 7..7: /mod_base="OTHER" /note="2'-OMe-nucleotide"
  modified_base 8..8: /mod_base="OTHER" /note="2'-OMe-nucleotide"
  modified_base 9..9: /mod_base="OTHER" /note="2'-OMe-nucleotide"
  modified_base 10..10: /mod_base="OTHER" /note="2'-OMe-nucleotide"
  modified_base 11..11: /mod_base="OTHER" /note="2'-OMe-nucleotide"
  modified_base 12..12: /mod_base="OTHER" /note="2'-OMe-nucleotide"
  modified_base 13..13: /mod_base="OTHER" /note="2'-OMe-nucleotide"
  modified_base 14..14: /mod_base="OTHER" /note="2'-fluoro-nucleotide"
  modified_base 15..15: /mod_base="OTHER" /note="2'-OMe-nucleotide"
  modified_base 16..16: /mod_base="OTHER" /note="2'-fluoro-nucleotide"
  modified_base 17..17: /mod_base="OTHER" /note="2'-OMe-nucleotide"
  modified_base 18..18: /mod_base="OTHER" /note="2'-OMe-nucleotide"
  modified_base 19..19: /mod_base="OTHER" /note="2'-OMe-nucleotide"
  misc_feature 19..20: /note="phosphorothioate bond"
  modified_base 20..20: /mod_base="OTHER" /note="2'-OMe-nucleotide"
  misc_feature 20..21: /note="phosphorothioate bond"
  modified_base 21..21: /mod_base="OTHER" /note="2'-OMe-nucleotide"
ucucuuaaggauuuaauacaa

SEQ ID NO: 1078 - RNA, 21 nt, Artificial Sequence
  Description of Artificial Sequence: Synthetic oligonucleotide
  N-term hydroxyl group
  C-term hydroxyl group
  modified_base 1..1: /mod_base="OTHER" /note="2'-OMe-nucleotide"
  misc_feature 1..2: /note="phosphorothioate bond"
  modified_base 2..2: /mod_base="OTHER" /note="2'-fluoro-nucleotide"
  misc_feature 2..3: /note="phosphorothioate bond"
  modified_base 3..3: /mod_base="OTHER" /note="2'-OMe-nucleotide"
  modified_base 4..4: /mod_base="OTHER" /note="2'-OMe-nucleotide"
  modified_base 5..5: /mod_base="OTHER" /note="2'-OMe-nucleotide"
  modified_base 6..6: /mod_base="OTHER" /note="2'-fluoro-nucleotide"
  modified_base 7..7: /mod_base="OTHER" /note="2'-OMe-nucleotide"
  modified_base 8..8: /mod_base="OTHER" /note="2'-OMe-nucleotide"
  modified_base 9..9: /mod_base="OTHER" /note="2'-OMe-nucleotide"
  modified_base 10..10: /mod_base="OTHER" /note="2'-OMe-nucleotide"
  modified_base 11..11: /mod_base="OTHER" /note="2'-OMe-nucleotide"
  modified_base 12..12: /mod_base="OTHER" /note="2'-OMe-nucleotide"
  modified_base 13..13: /mod_base="OTHER" /note="2'-OMe-nucleotide"
  modified_base 14..14: /mod_base="OTHER" /note="2'-fluoro-nucleotide"
  modified_base 15..15: /mod_base="OTHER" /note="2'-OMe-nucleotide"
  modified_base 16..16: /mod_base="OTHER" /note="2'-fluoro-nucleotide"
  modified_base 17..17: /mod_base="OTHER" /note="2'-OMe-nucleotide"
  modified_base 18..18: /mod_base="OTHER" /note="2'-OMe-nucleotide"
  modified_base 19..19: /mod_base="OTHER" /note="2'-OMe-nucleotide"
  misc_feature 19..20: /note="phosphorothioate bond"
  modified_base 20..20: /mod_base="OTHER" /note="2'-OMe-nucleotide"
  misc_feature 20..21: /note="phosphorothioate bond"
  modified_base 21..21: /mod_base="OTHER" /note="2'-OMe-nucleotide"
ucucuuaaggauuuaauacaa

SEQ ID NO: 1079 - RNA, 21 nt, Artificial Sequence
  Description of Artificial Sequence: Synthetic oligonucleotide
  N-term hydroxyl group
  C-term hydroxyl group
  modified_base 1..1: /mod_base="OTHER" /note="2'-OMe-nucleotide"
  misc_feature 1..2: /note="phosphorothioate bond"
  modified_base 2..2: /mod_base="OTHER" /note="2'-fluoro-nucleotide"
  misc_feature 2..3: /note="phosphorothioate bond"
  modified_base 3..3: /mod_base="OTHER" /note="2'-OMe-nucleotide"
  modified_base 4..4: /mod_base="OTHER" /note="2'-fluoro-nucleotide"
  modified_base 5..5: /mod_base="OTHER" /note="2'-OMe-nucleotide"
  modified_base 6..6: /mod_base="OTHER" /note="2'-OMe-nucleotide"
  modified_base 7..7: /mod_base="OTHER" /note="2'-OMe-nucleotide"
  modified_base 8..8: /mod_base="OTHER" /note="2'-OMe-nucleotide"
  modified_base 9..9: /mod_base="OTHER" /note="2'-fluoro-nucleotide"
  modified_base 10..10: /mod_base="OTHER" /note="2'-OMe-nucleotide"
  modified_base 11..11: /mod_base="OTHER" /note="2'-OMe-nucleotide"
  modified_base 12..12: /mod_base="OTHER" /note="2'-OMe-nucleotide"
  modified_base 13..13: /mod_base="OTHER" /note="2'-OMe-nucleotide"
  modified_base 14..14: /mod_base="OTHER" /note="2'-fluoro-nucleotide"
  modified_base 15..15: /mod_base="OTHER" /note="2'-OMe-nucleotide"
  modified_base 16..16: /mod_base="OTHER" /note="2'-fluoro-nucleotide"
  modified_base 17..17: /mod_base="OTHER" /note="2'-OMe-nucleotide"
  modified_base 18..18: /mod_base="OTHER" /note="2'-OMe-nucleotide"
  modified_base 19..19: /mod_base="OTHER" /note="2'-OMe-nucleotide"
  misc_feature 19..20: /note="phosphorothioate bond"
  modified_base 20..20: /mod_base="OTHER" /note="2'-OMe-nucleotide"
  misc_feature 20..21: /note="phosphorothioate bond"
  modified_base 21..21: /mod_base="OTHER" /note="2'-OMe-nucleotide"
ucucuuaaggauuuaauacaa

SEQ ID NO: 1080 - DNA, 21 bp, Artificial Sequence
  Description of Artificial Sequence: Synthetic oligonucleotide
  Description of Combined DNA/RNA Molecule: Synthetic oligonucleotide
  N-term hydroxyl group
  C-term hydroxyl group
  modified_base 1..1: /mod_base="OTHER" /note="2'-fluoro-nucleotide"
  misc_feature 1..2: /note="phosphorothioate bond"
  modified_base 2..2: /mod_base="OTHER" /note="2'-fluoro-nucleotide"
  misc_feature 2..3: /note="phosphorothioate bond"
  modified_base 3..3: /mod_base="OTHER" /note="2'-OMe-nucleotide"
  modified_base 4..4: /mod_base="OTHER" /note="2'-fluoro-nucleotide"
  modified_base 5..5: /mod_base="OTHER" /note="2'-OMe-nucleotide"
  modified_base 6..6: /mod_base="OTHER" /note="2'-fluoro-nucleotide"
  modified_base 7..7: /mod_base="OTHER" /note="2'-OMe-nucleotide"
  modified_base 8..8: /mod_base="OTHER" /note="2'-fluoro-nucleotide"
  modified_base 9..9: /mod_base="OTHER" /note="2'-OMe-nucleotide"
  modified_base 10..10: /mod_base="OTHER" /note="2'-fluoro-nucleotide"
  modified_base 11..11: /mod_base="OTHER" /note="2'-OMe-nucleotide"
  modified_base 12..12: /mod_base="OTHER" /note="2'-OMe-nucleotide"
  modified_base 13..13: /mod_base="OTHER" /note="2'-OMe-nucleotide"
  modified_base 14..14: /mod_base="OTHER" /note="2'-fluoro-nucleotide"
  modified_base 15..15: /mod_base="OTHER" /note="2'-OMe-nucleotide"
  modified_base 16..16: /mod_base="OTHER" /note="2'-fluoro-nucleotide"
  modified_base 17..17: /mod_base="OTHER" /note="2'-OMe-nucleotide"
  modified_base 18..18: /mod_base="OTHER" /note="2'-fluoro-nucleotide"
  modified_base 19..19: /mod_base="OTHER" /note="2'-OMe-nucleotide"
  misc_feature 19..20: /note="phosphorothioate bond"
  modified_base 20..20: /mod_base="OTHER" /note="dT"
  misc_feature 20..21: /note="phosphorothioate bond"
  modified_base 21..21: /mod_base="OTHER" /note="dT"
ucucuuaaggauuuaauactt

SEQ ID NO: 1081 - RNA, 21 nt, Artificial Sequence
  Description of Artificial Sequence: Synthetic oligonucleotide
  N-term hydroxyl group
  C-term hydroxyl group
  modified_base 1..1: /mod_base="OTHER" /note="2'-OMe-nucleotide"
  misc_feature 1..2: /note="phosphorothioate bond"
  modified_base 2..2: /mod_base="OTHER" /note="2'-fluoro-nucleotide"
  misc_feature 2..3: /note="phosphorothioate bond"
  modified_base 3..3: /mod_base="OTHER" /note="2'-OMe-nucleotide"
  modified_base 4..4: /mod_base="OTHER" /note="2'-fluoro-nucleotide"
  modified_base 5..5: /mod_base="OTHER" /note="2'-OMe-nucleotide"
  modified_base 6..6: /mod_base="OTHER" /note="2'-OMe-nucleotide"
  modified_base 7..7: /mod_base="OTHER" /note="2'-OMe-nucleotide"
  modified_base 8..8: /mod_base="OTHER" /note="2'-OMe-nucleotide"
  modified_base 9..9: /mod_base="OTHER" /note="2'-OMe-nucleotide"
  modified_base 10..10: /mod_base="OTHER" /note="2'-OMe-nucleotide"
  modified_base 11..11: /mod_base="OTHER" /note="2'-OMe-nucleotide"
  modified_base 12..12: /mod_base="OTHER" /note="2'-OMe-nucleotide"
  modified_base 13..13: /mod_base="OTHER" /note="2'-OMe-nucleotide"
  modified_base 14..14: /mod_base="OTHER" /note="2'-fluoro-nucleotide"
  modified_base 15..15: /mod_base="OTHER" /note="2'-OMe-nucleotide"
  modified_base 16..16: /mod_base="OTHER" /note="2'-fluoro-nucleotide"
  modified_base 17..17: /mod_base="OTHER" /note="2'-OMe-nucleotide"
  modified_base 18..18: /mod_base="OTHER" /note="2'-OMe-nucleotide"
  modified_base 19..19: /mod_base="OTHER" /note="2'-OMe-nucleotide"
  misc_feature 19..20: /note="phosphorothioate bond"
  modified_base 20..20: /mod_base="OTHER" /note="2'-OMe-nucleotide"
  misc_feature 20..21: /note="phosphorothioate bond"
  modified_base 21..21: /mod_base="OTHER" /note="2'-OMe-nucleotide"
ucucuuaaggauuuaauacaa

SEQ ID NO: 1082 - RNA, 21 nt, Artificial Sequence
  Description of Artificial Sequence: Synthetic oligonucleotide
  N-term hydroxyl group
  C-term hydroxyl group
  modified_base 1..1: /mod_base="OTHER" /note="2'-OMe-nucleotide"
  misc_feature 1..2: /note="phosphorothioate bond"
  modified_base 2..2: /mod_base="OTHER" /note="2'-fluoro-nucleotide"
  misc_feature 2..3: /note="phosphorothioate bond"
  modified_base 3..3: /mod_base="OTHER" /note="2'-OMe-nucleotide"
  modified_base 4..4: /mod_base="OTHER" /note="2'-OMe-nucleotide"
  modified_base 5..5: /mod_base="OTHER" /note="2'-OMe-nucleotide"
  modified_base 6..6: /mod_base="OTHER" /note="2'-fluoro-nucleotide"
  modified_base 7..7: /mod_base="OTHER" /note="2'-OMe-nucleotide"
  modified_base 8..8: /mod_base="OTHER" /note="2'-OMe-nucleotide"
  modified_base 9..9: /mod_base="OTHER" /note="2'-OMe-nucleotide"
  modified_base 10..10: /mod_base="OTHER" /note="2'-OMe-nucleotide"
  modified_base 11..11: /mod_base="OTHER" /note="2'-OMe-nucleotide"
  modified_base 12..12: /mod_base="OTHER" /note="2'-OMe-nucleotide"
  modified_base 13..13: /mod_base="OTHER" /note="2'-OMe-nucleotide"
  modified_base 14..14: /mod_base="OTHER" /note="2'-fluoro-nucleotide"
  modified_base 15..15: /mod_base="OTHER" /note="2'-OMe-nucleotide"
  modified_base 16..16: /mod_base="OTHER" /note="2'-fluoro-nucleotide"
  modified_base 17..17: /mod_base="OTHER" /note="2'-OMe-nucleotide"
  modified_base 18..18: /mod_base="OTHER" /note="2'-OMe-nucleotide"
  modified_base 19..19: /mod_base="OTHER" /note="2'-OMe-nucleotide"
  misc_feature 19..20: /note="phosphorothioate bond"
  modified_base 20..20: /mod_base="OTHER" /note="2'-OMe-nucleotide"
  misc_feature 20..21: /note="phosphorothioate bond"
  modified_base 21..21: /mod_base="OTHER" /note="2'-OMe-nucleotide"
ucucuuaaggauuuaauacaa

SEQ ID NO: 1083 - RNA, 21 nt, Artificial Sequence
  Description of Artificial Sequence: Synthetic oligonucleotide
  N-term hydroxyl group
  C-term hydroxyl group
  modified_base 1..1: /mod_base="OTHER" /note="2'-OMe-nucleotide"
  misc_feature 1..2: /note="phosphorothioate bond"
  modified_base 2..2: /mod_base="OTHER" /note="2'-fluoro-nucleotide"
  misc_feature 2..3: /note="phosphorothioate bond"
  modified_base 3..3: /mod_base="OTHER" /note="2'-OMe-nucleotide"
  modified_base 4..4: /mod_base="OTHER" /note="2'-fluoro-nucleotide"
  modified_base 5..5: /mod_base="OTHER" /note="2'-OMe-nucleotide"
  modified_base 6..6: /mod_base="OTHER" /note="2'-OMe-nucleotide"
  modified_base 7..7: /mod_base="OTHER" /note="2'-OMe-nucleotide"
  modified_base 8..8: /mod_base="OTHER" /note="2'-fluoro-nucleotide"
  modified_base 9..9: /mod_base="OTHER" /note="2'-OMe-nucleotide"
  modified_base 10..10: /mod_base="OTHER" /note="2'-OMe-nucleotide"
  modified_base 11..11: /mod_base="OTHER" /note="2'-OMe-nucleotide"
  modified_base 12..12: /mod_base="OTHER" /note="2'-OMe-nucleotide"
  modified_base 13..13: /mod_base="OTHER" /note="2'-OMe-nucleotide"
  modified_base 14..14: /mod_base="OTHER" /note="2'-fluoro-nucleotide"
  modified_base 15..15: /mod_base="OTHER" /note="2'-OMe-nucleotide"
  modified_base 16..16: /mod_base="OTHER" /note="2'-fluoro-nucleotide"
  modified_base 17..17: /mod_base="OTHER" /note="2'-OMe-nucleotide"
  modified_base 18..18: /mod_base="OTHER" /note="2'-OMe-nucleotide"
  modified_base 19..19: /mod_base="OTHER" /note="2'-OMe-nucleotide"
  misc_feature 19..20: /note="phosphorothioate bond"
  modified_base 20..20: /mod_base="OTHER" /note="2'-OMe-nucleotide"
  misc_feature 20..21: /note="phosphorothioate bond"
  modified_base 21..21: /mod_base="OTHER" /note="2'-OMe-nucleotide"
ucucuuaaggauuuaauacaa

SEQ ID NO: 1084 - RNA, 21 nt, Artificial Sequence
  Description of Artificial Sequence: Synthetic oligonucleotide
  N-term hydroxyl group
  C-term hydroxyl group
  modified_base 1..1: /mod_base="OTHER" /note="2'-OMe-nucleotide"
  misc_feature 1..2: /note="phosphorothioate bond"
  modified_base 2..2: /mod_base="OTHER" /note="2'-fluoro-nucleotide"
  misc_feature 2..3: /note="phosphorothioate bond"
  modified_base 3..3: /mod_base="OTHER" /note="2'-OMe-nucleotide"
  modified_base 4..4: /mod_base="OTHER" /note="2'-OMe-nucleotide"
  modified_base 5..5: /mod_base="OTHER" /note="2'-OMe-nucleotide"
  modified_base 6..6: /mod_base="OTHER" /note="2'-OMe-nucleotide"
  modified_base 7..7: /mod_base="OTHER" /note="2'-OMe-nucleotide"
  modified_base 8..8: /mod_base="OTHER" /note="2'-fluoro-nucleotide"
  modified_base 9..9: /mod_base="OTHER" /note="2'-OMe-nucleotide"
  modified_base 10..10: /mod_base="OTHER" /note="2'-OMe-nucleotide"
  modified_base 11..11: /mod_base="OTHER" /note="2'-OMe-nucleotide"
  modified_base 12..12: /mod_base="OTHER" /note="2'-OMe-nucleotide"
  modified_base 13..13: /mod_base="OTHER" /note="2'-OMe-nucleotide"
  modified_base 14..14: /mod_base="OTHER" /note="2'-fluoro-nucleotide"
  modified_base 15..15: /mod_base="OTHER" /note="2'-OMe-nucleotide"
  modified_base 16..16: /mod_base="OTHER" /note="2'-fluoro-nucleotide"
  modified_base 17..17: /mod_base="OTHER" /note="2'-OMe-nucleotide"
  modified_base 18..18: /mod_base="OTHER" /note="2'-OMe-nucleotide"
  modified_base 19..19: /mod_base="OTHER" /note="2'-OMe-nucleotide"
  misc_feature 19..20: /note="phosphorothioate bond"
  modified_base 20..20: /mod_base="OTHER" /note="2'-OMe-nucleotide"
  misc_feature 20..21: /note="phosphorothioate bond"
  modified_base 21..21: /mod_base="OTHER" /note="2'-OMe-nucleotide"
ucucuuaaggauuuaauacaa

SEQ ID NO: 1085 - DNA, 21 bp, Artificial Sequence
  Description of Artificial Sequence: Synthetic oligonucleotide
  Description of Combined DNA/RNA Molecule: Synthetic oligonucleotide
  N-term hydroxyl group
  C-term hydroxyl group
  modified_base 1..1: /mod_base="OTHER" /note="2'-fluoro-nucleotide"
  misc_feature 1..2: /note="phosphorothioate bond"
  modified_base 2..2: /mod_base="OTHER" /note="2'-fluoro-nucleotide"
  misc_feature 2..3: /note="phosphorothioate bond"
  modified_base 3..3: /mod_base="OTHER" /note="2'-OMe-nucleotide"
  modified_base 4..4: /mod_base="OTHER" /note="2'-fluoro-nucleotide"
  modified_base 5..5: /mod_base="OTHER" /note="2'-OMe-nucleotide"
  modified_base 6..6: /mod_base="OTHER" /note="2'-fluoro-nucleotide"
  modified_base 7..7: /mod_base="OTHER" /note="2'-OMe-nucleotide"
  modified_base 8..8: /mod_base="OTHER" /note="2'-fluoro-nucleotide"
  modified_base 9..9: /mod_base="OTHER" /note="2'-OMe-nucleotide"
  modified_base 10..10: /mod_base="OTHER" /note="2'-OMe-nucleotide"
  modified_base 11..11: /mod_base="OTHER" /note="2'-OMe-nucleotide"
  modified_base 12..12: /mod_base="OTHER" /note="2'-fluoro-nucleotide"
  modified_base 13..13: /mod_base="OTHER" /note="2'-OMe-nucleotide"
  modified_base 14..14: /mod_base="OTHER" /note="2'-fluoro-nucleotide"
  modified_base 15..15: /mod_base="OTHER" /note="2'-OMe-nucleotide"
  modified_base 16..16: /mod_base="OTHER" /note="2'-fluoro-nucleotide"
  modified_base 17..17: /mod_base="OTHER" /note="2'-OMe-nucleotide"
  modified_base 18..18: /mod_base="OTHER" /note="2'-fluoro-nucleotide"
  modified_base 19..19: /mod_base="OTHER" /note="2'-OMe-nucleotide"
  misc_feature 19..20: /note="phosphorothioate bond"
  modified_base 20..20: /mod_base="OTHER" /note="dT"
  misc_feature 20..21: /note="phosphorothioate bond"
  modified_base 21..21: /mod_base="OTHER" /note="dT"
ucucuuaaggauuuaauactt

SEQ ID NO: 1086 - RNA, 21 nt, Artificial Sequence
  Description of Artificial Sequence: Synthetic oligonucleotide
  N-term hydroxyl group
  C-term hydroxyl group
  modified_base 1..1: /mod_base="OTHER" /note="2'-OMe-nucleotide"
  misc_feature 1..2: /note="phosphorothioate bond"
  modified_base 2..2: /mod_base="OTHER" /note="2'-fluoro-nucleotide"
  misc_feature 2..3: /note="phosphorothioate bond"
  modified_base 3..3: /mod_base="OTHER" /note="2'-OMe-nucleotide"
  modified_base 4..4: /mod_base="OTHER" /note="2'-fluoro-nucleotide"
  modified_base 5..5: /mod_base="OTHER" /note="2'-OMe-nucleotide"
  modified_base 6..6: /mod_base="OTHER" /note="2'-OMe-nucleotide"
  modified_base 7..7: /mod_base="OTHER" /note="2'-OMe-nucleotide"
  modified_base 8..8: /mod_base="OTHER" /note="2'-OMe-nucleotide"
  modified_base 9..9: /mod_base="OTHER" /note="2'-OMe-nucleotide"
  modified_base 10..10: /mod_base="OTHER" /note="2'-OMe-nucleotide"
  modified_base 11..11: /mod_base="OTHER" /note="2'-OMe-nucleotide"
  modified_base 12..12: /mod_base="OTHER" /note="2'-OMe-nucleotide"
  modified_base 13..13: /mod_base="OTHER" /note="2'-OMe-nucleotide"
  modified_base 14..14: /mod_base="OTHER" /note="2'-fluoro-nucleotide"
  modified_base 15..15: /mod_base="OTHER" /note="2'-OMe-nucleotide"
  modified_base 16..16: /mod_base="OTHER" /note="2'-fluoro-nucleotide"
  modified_base 17..17: /mod_base="OTHER" /note="2'-OMe-nucleotide"
  modified_base 18..18: /mod_base="OTHER" /note="2'-OMe-nucleotide"
  modified_base 19..19: /mod_base="OTHER" /note="2'-OMe-nucleotide"
  misc_feature 19..20: /note="phosphorothioate bond"
  modified_base 20..20: /mod_base="OTHER" /note="2'-OMe-nucleotide"
  misc_feature 20..21: /note="phosphorothioate bond"
  modified_base 21..21: /mod_base="OTHER" /note="2'-OMe-nucleotide"
ucucuuaaggauuuaauacaa

SEQ ID NO: 1087 - RNA, 21 nt, Artificial Sequence
  Description of Artificial Sequence: Synthetic oligonucleotide
  N-term hydroxyl group
  C-term hydroxyl group
  modified_base 1..1: /mod_base="OTHER" /note="2'-OMe-nucleotide"
  misc_feature 1..2: /note="phosphorothioate bond"
  modified_base 2..2: /mod_base="OTHER" /note="2'-fluoro-nucleotide"
  misc_feature 2..3: /note="phosphorothioate bond"
  modified_base 3..3: /mod_base="OTHER" /note="2'-OMe-nucleotide"
  modified_base 4..4: /mod_base="OTHER" /note="2'-OMe-nucleotide"
  modified_base 5..5: /mod_base="OTHER" /note="2'-OMe-nucleotide"
  modified_base 6..6: /mod_base="OTHER" /note="2'-fluoro-nucleotide"
  modified_base 7..7: /mod_base="OTHER" /note="2'-OMe-nucleotide"
  modified_base 8..8: /mod_base="OTHER" /note="2'-OMe-nucleotide"
  modified_base 9..9: /mod_base="OTHER" /note="2'-OMe-nucleotide"
  modified_base 10..10: /mod_base="OTHER" /note="2'-OMe-nucleotide"
  modified_base 11..11: /mod_base="OTHER" /note="2'-OMe-nucleotide"
  modified_base 12..12: /mod_base="OTHER" /note="2'-OMe-nucleotide"
  modified_base 13..13: /mod_base="OTHER" /note="2'-OMe-nucleotide"
  modified_base 14..14: /mod_base="OTHER" /note="2'-fluoro-nucleotide"
  modified_base 15..15: /mod_base="OTHER" /note="2'-OMe-nucleotide"
  modified_base 16..16: /mod_base="OTHER" /note="2'-fluoro-nucleotide"
  modified_base 17..17: /mod_base="OTHER" /note="2'-OMe-nucleotide"
  modified_base 18..18: /mod_base="OTHER" /note="2'-OMe-nucleotide"
  modified_base 19..19: /mod_base="OTHER" /note="2'-OMe-nucleotide"
  misc_feature 19..20: /note="phosphorothioate bond"
  modified_base 20..20: /mod_base="OTHER" /note="2'-OMe-nucleotide"
  misc_feature 20..21: /note="phosphorothioate bond"
  modified_base 21..21: /mod_base="OTHER" /note="2'-OMe-nucleotide"
ucucuuaaggauuuaauacaa

SEQ ID NO: 1088 - RNA, 21 nt, Artificial Sequence
  Description of Artificial Sequence: Synthetic oligonucleotide
  N-term hydroxyl group
  C-term hydroxyl group
  modified_base 1..1: /mod_base="OTHER" /note="2'-OMe-nucleotide"
  misc_feature 1..2: /note="phosphorothioate bond"
  modified_base 2..2: /mod_base="OTHER" /note="2'-fluoro-nucleotide"
  misc_feature 2..3: /note="phosphorothioate bond"
  modified_base 3..3: /mod_base="OTHER" /note="2'-OMe-nucleotide"
  modified_base 4..4: /mod_base="OTHER" /note="2'-fluoro-nucleotide"
  modified_base 5..5: /mod_base="OTHER" /note="2'-OMe-nucleotide"
  modified_base 6..6: /mod_base="OTHER" /note="2'-OMe-nucleotide"
  modified_base 7..7: /mod_base="OTHER" /note="2'-OMe-nucleotide"
  modified_base 8..8: /mod_base="OTHER" /note="2'-fluoro-nucleotide"
  modified_base 9..9: /mod_base="OTHER" /note="2'-OMe-nucleotide"
  modified_base 10..10: /mod_base="OTHER" /note="2'-OMe-nucleotide"
  modified_base 11..11: /mod_base="OTHER" /note="2'-OMe-nucleotide"
  modified_base 12..12: /mod_base="OTHER" /note="2'-OMe-nucleotide"
  modified_base 13..13: /mod_base="OTHER" /note="2'-OMe-nucleotide"
  modified_base 14..14: /mod_base="OTHER" /note="2'-fluoro-nucleotide"
  modified_base 15..15: /mod_base="OTHER" /note="2'-OMe-nucleotide"
  modified_base 16..16: /mod_base="OTHER" /note="2'-fluoro-nucleotide"
  modified_base 17..17: /mod_base="OTHER" /note="2'-OMe-nucleotide"
  modified_base 18..18: /mod_base="OTHER" /note="2'-OMe-nucleotide"
  modified_base 19..19: /mod_base="OTHER" /note="2'-OMe-nucleotide"
  misc_feature 19..20: /note="phosphorothioate bond"
  modified_base 20..20: /mod_base="OTHER" /note="2'-OMe-nucleotide"
  misc_feature 20..21: /note="phosphorothioate bond"
  modified_base 21..21: /mod_base="OTHER" /note="2'-OMe-nucleotide"
ucucuuaaggauuuaauacaa

SEQ ID NO: 1089 - RNA, 21 nt, Artificial Sequence
  Description of Artificial Sequence: Synthetic oligonucleotide
  N-term hydroxyl group
  C-term hydroxyl group
  modified_base 1..1: /mod_base="OTHER" /note="2'-OMe-nucleotide"
  misc_feature 1..2: /note="phosphorothioate bond"
  modified_base 2..2: /mod_base="OTHER" /note="2'-fluoro-nucleotide"
  misc_feature 2..3: /note="phosphorothioate bond"
  modified_base 3..3: /mod_base="OTHER" /note="2'-OMe-nucleotide"
  modified_base 4..4: /mod_base="OTHER" /note="2'-OMe-nucleotide"
  modified_base 5..5: /mod_base="OTHER" /note="2'-OMe-nucleotide"
  modified_base 6..6: /mod_base="OTHER" /note="2'-OMe-nucleotide"
  modified_base 7..7: /mod_base="OTHER" /note="2'-OMe-nucleotide"
  modified_base 8..8: /mod_base="OTHER" /note="2'-fluoro-nucleotide"
  modified_base 9..9: /mod_base="OTHER" /note="2'-OMe-nucleotide"
  modified_base 10..10: /mod_base="OTHER" /note="2'-OMe-nucleotide"
  modified_base 11..11: /mod_base="OTHER" /note="2'-OMe-nucleotide"
  modified_base 12..12: /mod_base="OTHER" /note="2'-OMe-nucleotide"
  modified_base 13..13: /mod_base="OTHER" /note="2'-OMe-nucleotide"
  modified_base 14..14: /mod_base="OTHER" /note="2'-fluoro-nucleotide"
  modified_base 15..15: /mod_base="OTHER" /note="2'-OMe-nucleotide"
  modified_base 16..16: /mod_base="OTHER" /note="2'-fluoro-nucleotide"
  modified_base 17..17: /mod_base="OTHER" /note="2'-OMe-nucleotide"
  modified_base 18..18: /mod_base="OTHER" /note="2'-OMe-nucleotide"
  modified_base 19..19: /mod_base="OTHER" /note="2'-OMe-nucleotide"
  misc_feature 19..20: /note="phosphorothioate bond"
  modified_base 20..20: /mod_base="OTHER" /note="2'-OMe-nucleotide"
  misc_feature 20..21: /note="phosphorothioate bond"
  modified_base 21..21: /mod_base="OTHER" /note="2'-OMe-nucleotide"
ucucuuaaggauuuaauacaa

SEQ ID NO: 1090 - DNA, 21 bp, Artificial Sequence
  Description of Artificial Sequence: Synthetic oligonucleotide
  Description of Combined DNA/RNA Molecule: Synthetic oligonucleotide
  N-term hydroxyl group
  C-term hydroxyl group
  modified_base 1..1: /mod_base="OTHER" /note="2'-fluoro-nucleotide"
  misc_feature 1..2: /note="phosphorothioate bond"
  modified_base 2..2: /mod_base="OTHER" /note="2'-fluoro-nucleotide"
  misc_feature 2..3: /note="phosphorothioate bond"
  modified_base 3..3: /mod_base="OTHER" /note="2'-OMe-nucleotide"
  modified_base 4..4: /mod_base="OTHER" /note="2'-fluoro-nucleotide"
  modified_base 5..5: /mod_base="OTHER" /note="2'-OMe-nucleotide"
  modified_base 6..6: /mod_base="OTHER" /note="2'-fluoro-nucleotide"
  modified_base 7..7: /mod_base="OTHER" /note="2'-OMe-nucleotide"
  modified_base 8..8: /mod_base="OTHER" /note="2'-fluoro-nucleotide"
  modified_base 9..9: /mod_base="OTHER" /note="2'-OMe-nucleotide"
  modified_base 10..10: /mod_base="OTHER" /note="2'-OMe-nucleotide"
  modified_base 11..11: /mod_base="OTHER" /note="2'-OMe-nucleotide"
  modified_base 12..12: /mod_base="OTHER" /note="2'-fluoro-nucleotide"
  modified_base 13..13: /mod_base="OTHER" /note="2'-OMe-nucleotide"
  modified_base 14..14: /mod_base="OTHER" /note="2'-fluoro-nucleotide"
  modified_base 15..15: /mod_base="OTHER" /note="2'-OMe-nucleotide"
  modified_base 16..16: /mod_base="OTHER" /note="2'-fluoro-nucleotide"
  modified_base 17..17: /mod_base="OTHER" /note="2'-OMe-nucleotide"
  modified_base 18..18: /mod_base="OTHER" /note="2'-fluoro-nucleotide"
  modified_base 19..19: /mod_base="OTHER" /note="2'-OMe-nucleotide"
  misc_feature 19..20: /note="phosphorothioate bond"
  modified_base 20..20: /mod_base="OTHER" /note="dT"
  misc_feature 20..21: /note="phosphorothioate bond"
  modified_base 21..21: /mod_base="OTHER" /note="dT"
ucucuuaaggauuuaauactt

SEQ ID NO: 1091 - RNA, 21 nt, Artificial Sequence
  Description of Artificial Sequence: Synthetic oligonucleotide
  N-term hydroxyl group
  C-term hydroxyl group
  modified_base 1..1: /mod_base="OTHER" /note="2'-OMe-nucleotide"
  misc_feature 1..2: /note="phosphorothioate bond"
  modified_base 2..2: /mod_base="OTHER" /note="2'-fluoro-nucleotide"
  misc_feature 2..3: /note="phosphorothioate bond"
  modified_base 3..3: /mod_base="OTHER" /note="2'-OMe-nucleotide"
  modified_base 4..4: /mod_base="OTHER" /note="2'-fluoro-nucleotide"
  modified_base 5..5: /mod_base="OTHER" /note="2'-OMe-nucleotide"
  modified_base 6..6: /mod_base="OTHER" /note="2'-OMe-nucleotide"
  modified_base 7..7: /mod_base="OTHER" /note="2'-OMe-nucleotide"
  modified_base 8..8: /mod_base="OTHER" /note="2'-OMe-nucleotide"
  modified_base 9..9: /mod_base="OTHER" /note="2'-OMe-nucleotide"
  modified_base 10..10: /mod_base="OTHER" /note="2'-OMe-nucleotide"
  modified_base 11..11: /mod_base="OTHER" /note="2'-OMe-nucleotide"
  modified_base 12..12: /mod_base="OTHER" /note="2'-OMe-nucleotide"
  modified_base 13..13: /mod_base="OTHER" /note="2'-OMe-nucleotide"
  modified_base 14..14: /mod_base="OTHER" /note="2'-fluoro-nucleotide"
  modified_base 15..15: /mod_base="OTHER" /note="2'-OMe-nucleotide"
  modified_base 16..16: /mod_base="OTHER" /note="2'-fluoro-nucleotide"
  modified_base 17..17: /mod_base="OTHER" /note="2'-OMe-nucleotide"
  modified_base 18..18: /mod_base="OTHER" /note="2'-OMe-nucleotide"
  modified_base 19..19: /mod_base="OTHER" /note="2'-OMe-nucleotide"
  misc_feature 19..20: /note="phosphorothioate bond"
  modified_base 20..20: /mod_base="OTHER" /note="2'-OMe-nucleotide"
  misc_feature 20..21: /note="phosphorothioate bond"
  modified_base 21..21: /mod_base="OTHER" /note="2'-OMe-nucleotide"
ucucuuaaggauuuaauacaa

SEQ ID NO: 1092 - RNA, 21 nt, Artificial Sequence
  Description of Artificial Sequence: Synthetic oligonucleotide
  N-term hydroxyl group
  C-term hydroxyl group
  modified_base 1..1: /mod_base="OTHER" /note="2'-OMe-nucleotide"
  misc_feature 1..2: /note="phosphorothioate bond"
  modified_base 2..2: /mod_base="OTHER" /note="2'-fluoro-nucleotide"
  misc_feature 2..3: /note="phosphorothioate bond"
  modified_base 3..3: /mod_base="OTHER" /note="2'-OMe-nucleotide"
  modified_base 4..4: /mod_base="OTHER" /note="2'-OMe-nucleotide"
  modified_base 5..5: /mod_base="OTHER" /note="2'-OMe-nucleotide"
  modified_base 6..6: /mod_base="OTHER" /note="2'-fluoro-nucleotide"
  modified_base 7..7: /mod_base="OTHER" /note="2'-OMe-nucleotide"
  modified_base 8..8: /mod_base="OTHER" /note="2'-OMe-nucleotide"
  modified_base 9..9: /mod_base="OTHER" /note="2'-OMe-nucleotide"
  modified_base 10..10: /mod_base="OTHER" /note="2'-OMe-nucleotide"
  modified_base 11..11: /mod_base="OTHER" /note="2'-OMe-nucleotide"
  modified_base 12..12: /mod_base="OTHER" /note="2'-OMe-nucleotide"
  modified_base 13..13: /mod_base="OTHER" /note="2'-OMe-nucleotide"
  modified_base 14..14: /mod_base="OTHER" /note="2'-fluoro-nucleotide"
  modified_base 15..15: /mod_base="OTHER" /note="2'-OMe-nucleotide"
  modified_base 16..16: /mod_base="OTHER" /note="2'-fluoro-nucleotide"
  modified_base 17..17: /mod_base="OTHER" /note="2'-OMe-nucleotide"
  modified_base 18..18: /mod_base="OTHER" /note="2'-OMe-nucleotide"
  modified_base 19..19: /mod_base="OTHER" /note="2'-OMe-nucleotide"
  misc_feature 19..20: /note="phosphorothioate bond"
  modified_base 20..20: /mod_base="OTHER" /note="2'-OMe-nucleotide"
  misc_feature 20..21: /note="phosphorothioate bond"
  modified_base 21..21: /mod_base="OTHER" /note="2'-OMe-nucleotide"
ucucuuaaggauuuaauacaa

SEQ ID NO: 1093 - RNA, 21 nt, Artificial Sequence
  Description of Artificial Sequence: Synthetic oligonucleotide
  N-term hydroxyl group
  C-term hydroxyl group
  modified_base 1..1: /mod_base="OTHER" /note="2'-OMe-nucleotide"
  misc_feature 1..2: /note="phosphorothioate bond"
  modified_base 2..2: /mod_base="OTHER" /note="2'-fluoro-nucleotide"
  misc_feature 2..3: /note="phosphorothioate bond"
  modified_base 3..3: /mod_base="OTHER" /note="2'-OMe-nucleotide"
  modified_base 4..4: /mod_base="OTHER" /note="2'-fluoro-nucleotide"
  modified_base 5..5: /mod_base="OTHER" /note="2'-OMe-nucleotide"
  modified_base 6..6: /mod_base="OTHER" /note="2'-OMe-nucleotide"
  modified_base 7..7: /mod_base="OTHER" /note="2'-OMe-nucleotide"
  modified_base 8..8: /mod_base="OTHER" /note="2'-OMe-nucleotide"
  modified_base 9..9: /mod_base="OTHER" /note="2'-fluoro-nucleotide"
  modified_base 10..10: /mod_base="OTHER" /note="2'-OMe-nucleotide"
  modified_base 11..11: /mod_base="OTHER" /note="2'-OMe-nucleotide"
  modified_base 12..12: /mod_base="OTHER" /note="2'-OMe-nucleotide"
  modified_base 13..13: /mod_base="OTHER" /note="2'-OMe-nucleotide"
  modified_base 14..14: /mod_base="OTHER" /note="2'-fluoro-nucleotide"
  modified_base 15..15: /mod_base="OTHER" /note="2'-OMe-nucleotide"
  modified_base 16..16: /mod_base="OTHER" /note="2'-fluoro-nucleotide"
  modified_base 17..17: /mod_base="OTHER" /note="2'-OMe-nucleotide"
  modified_base 18..18: /mod_base="OTHER" /note="2'-OMe-nucleotide"
  modified_base 19..19: /mod_base="OTHER" /note="2'-OMe-nucleotide"
  misc_feature 19..20: /note="phosphorothioate bond"
  modified_base 20..20: /mod_base="OTHER" /note="2'-OMe-nucleotide"
  misc_feature 20..21: /note="phosphorothioate bond"
  modified_base 21..21: /mod_base="OTHER" /note="2'-OMe-nucleotide"
ucucuuaaggauuuaauacaa

SEQ ID NO: 1094 - DNA, 21 bp, Artificial Sequence
  Description of Artificial Sequence: Synthetic oligonucleotide
  Description of Combined DNA/RNA Molecule: Synthetic oligonucleotide
  N-term hydroxyl group
  C-term hydroxyl group
  modified_base 1..1: /mod_base="OTHER" /note="2'-fluoro-nucleotide"
  misc_feature 1..2: /note="phosphorothioate bond"
  modified_base 2..2: /mod_base="OTHER" /note="2'-fluoro-nucleotide"
  misc_feature 2..3: /note="phosphorothioate bond"
  modified_base 3..3: /mod_base="OTHER" /note="2'-OMe-nucleotide"
  modified_base 4..4: /mod_base="OTHER" /note="2'-fluoro-nucleotide"
  modified_base 5..5: /mod_base="OTHER" /note="2'-OMe-nucleotide"
  modified_base 6..6: /mod_base="OTHER" /note="2'-fluoro-nucleotide"
  modified_base 7..7: /mod_base="OTHER" /note="2'-OMe-nucleotide"
  modified_base 8..8: /mod_base="OTHER" /note="2'-fluoro-nucleotide"
  modified_base 9..9: /mod_base="OTHER" /note="2'-OMe-nucleotide"
  modified_base 10..10: /mod_base="OTHER" /note="2'-fluoro-nucleotide"
  modified_base 11..11: /mod_base="OTHER" /note="2'-OMe-nucleotide"
  modified_base 12..12: /mod_base="OTHER" /note="2'-OMe-nucleotide"
  modified_base 13..13: /mod_base="OTHER" /note="2'-OMe-nucleotide"
  modified_base 14..14: /mod_base="OTHER" /note="2'-fluoro-nucleotide"
  modified_base 15..15: /mod_base="OTHER" /note="2'-OMe-nucleotide"
  modified_base 16..16: /mod_base="OTHER" /note="2'-fluoro-nucleotide"
  modified_base 17..17: /mod_base="OTHER" /note="2'-OMe-nucleotide"
  modified_base 18..18: /mod_base="OTHER" /note="2'-fluoro-nucleotide"
  modified_base 19..19: /mod_base="OTHER" /note="2'-OMe-nucleotide"
  misc_feature 19..20: /note="phosphorothioate bond"
  modified_base 20..20: /mod_base="OTHER" /note="dT"
  misc_feature 20..21: /note="phosphorothioate bond"
  modified_base 21..21: /mod_base="OTHER" /note="dT"
ucucuuaaggauuuaauactt

SEQ ID NO: 1095 - RNA, 21 nt, Artificial Sequence
  Description of Artificial Sequence: Synthetic oligonucleotide
  N-term hydroxyl group
  C-term hydroxyl group
  modified_base 1..1: /mod_base="OTHER" /note="2'-OMe-nucleotide"
  misc_feature 1..2: /note="phosphorothioate bond"
  modified_base 2..2: /mod_base="OTHER" /note="2'-fluoro-nucleotide"
  misc_feature 2..3: /note="phosphorothioate bond"
  modified_base 3..3: /mod_base="OTHER" /note="2'-OMe-nucleotide"
  modified_base 4..4: /mod_base="OTHER" /note="2'-fluoro-nucleotide"
  modified_base 5..5: /mod_base="OTHER" /note="2'-OMe-nucleotide"
  modified_base 6..6: /mod_base="OTHER" /note="2'-OMe-nucleotide"
  modified_base 7..7: /mod_base="OTHER" /note="2'-OMe-nucleotide"
  modified_base 8..8: /mod_base="OTHER" /note="2'-OMe-nucleotide"
  modified_base 9..9: /mod_base="OTHER" /note="2'-OMe-nucleotide"
  modified_base 10..10: /mod_base="OTHER" /note="2'-OMe-nucleotide"
  modified_base 11..11: /mod_base="OTHER" /note="2'-OMe-nucleotide"
  modified_base 12..12: /mod_base="OTHER" /note="2'-OMe-nucleotide"
  modified_base 13..13: /mod_base="OTHER" /note="2'-OMe-nucleotide"
  modified_base 14..14: /mod_base="OTHER" /note="2'-fluoro-nucleotide"
  modified_base 15..15: /mod_base="OTHER" /note="2'-OMe-nucleotide"
  modified_base 16..16: /mod_base="OTHER" /note="2'-fluoro-nucleotide"
  modified_base 17..17: /mod_base="OTHER" /note="2'-OMe-nucleotide"
  modified_base 18..18: /mod_base="OTHER" /note="2'-OMe-nucleotide"
  modified_base 19..19: /mod_base="OTHER" /note="2'-OMe-nucleotide"
  misc_feature 19..20: /note="phosphorothioate bond"
  modified_base 20..20: /mod_base="OTHER" /note="2'-OMe-nucleotide"
  misc_feature 20..21: /note="phosphorothioate bond"
  modified_base 21..21: /mod_base="OTHER" /note="2'-OMe-nucleotide"
ucucuuaaggauuuaauacaa

SEQ ID NO: 1096 - RNA, 21 nt, Artificial Sequence
  Description of Artificial Sequence: Synthetic oligonucleotide
  N-term hydroxyl group
  C-term hydroxyl group
  modified_base 1..1: /mod_base="OTHER" /note="2'-OMe-nucleotide"
  misc_feature 1..2: /note="phosphorothioate bond"
  modified_base 2..2: /mod_base="OTHER" /note="2'-fluoro-nucleotide"
  misc_feature 2..3: /note="phosphorothioate bond"
  modified_base 3..3: /mod_base="OTHER" /note="2'-OMe-nucleotide"
  modified_base 4..4: /mod_base="OTHER" /note="2'-OMe-nucleotide"
  modified_base 5..5: /mod_base="OTHER" /note="2'-OMe-nucleotide"
  modified_base 6..6: /mod_base="OTHER" /note="2'-fluoro-nucleotide"
  modified_base 7..7: /mod_base="OTHER" /note="2'-OMe-nucleotide"
  modified_base 8..8: /mod_base="OTHER" /note="2'-OMe-nucleotide"
  modified_base 9..9: /mod_base="OTHER" /note="2'-OMe-nucleotide"
  modified_base 10..10: /mod_base="OTHER" /note="2'-OMe-nucleotide"
  modified_base 11..11: /mod_base="OTHER" /note="2'-OMe-nucleotide"
  modified_base 12..12: /mod_base="OTHER" /note="2'-OMe-nucleotide"
  modified_base 13..13: /mod_base="OTHER" /note="2'-OMe-nucleotide"
  modified_base 14..14: /mod_base="OTHER" /note="2'-fluoro-nucleotide"
  modified_base 15..15: /mod_base="OTHER" /note="2'-OMe-nucleotide"
  modified_base 16..16: /mod_base="OTHER" /note="2'-fluoro-nucleotide"
  modified_base 17..17: /mod_base="OTHER" /note="2'-OMe-nucleotide"
  modified_base 18..18: /mod_base="OTHER" /note="2'-OMe-nucleotide"
  modified_base 19..19: /mod_base="OTHER" /note="2'-OMe-nucleotide"
  misc_feature 19..20: /note="phosphorothioate bond"
  modified_base 20..20: /mod_base="OTHER" /note="2'-OMe-nucleotide"
  misc_feature 20..21: /note="phosphorothioate bond"
  modified_base 21..21: /mod_base="OTHER" /note="2'-OMe-nucleotide"
ucucuuaaggauuuaauacaa

SEQ ID NO: 1097 - RNA, 21 nt, Artificial Sequence
  Description of Artificial Sequence: Synthetic oligonucleotide
  N-term hydroxyl group
  C-term hydroxyl group
  modified_base 1..1: /mod_base="OTHER" /note="2'-OMe-nucleotide"
  misc_feature 1..2: /note="phosphorothioate bond"
  modified_base 2..2: /mod_base="OTHER" /note="2'-fluoro-nucleotide"
  misc_feature 2..3: /note="phosphorothioate bond"
  modified_base 3..3: /mod_base="OTHER" /note="2'-OMe-nucleotide"
  modified_base 4..4: /mod_base="OTHER" /note="2'-fluoro-nucleotide"
  modified_base 5..5: /mod_base="OTHER" /note="2'-OMe-nucleotide"
  modified_base 6..6: /mod_base="OTHER" /note="2'-OMe-nucleotide"
  modified_base 7..7: /mod_base="OTHER" /note="2'-OMe-nucleotide"
  modified_base 8..8: /mod_base="OTHER" /note="2'-OMe-nucleotide"
  modified_base 9..9: /mod_base="OTHER" /note="2'-fluoro-nucleotide"
  modified_base 10..10: /mod_base="OTHER" /note="2'-OMe-nucleotide"
  modified_base 11..11: /mod_base="OTHER" /note="2'-OMe-nucleotide"
  modified_base 12..12: /mod_base="OTHER" /note="2'-OMe-nucleotide"
  modified_base 13..13: /mod_base="OTHER" /note="2'-OMe-nucleotide"
  modified_base 14..14: /mod_base="OTHER" /note="2'-fluoro-nucleotide"
  modified_base 15..15: /mod_base="OTHER" /note="2'-OMe-nucleotide"
  modified_base 16..16: /mod_base="OTHER" /note="2'-fluoro-nucleotide"
  modified_base 17..17: /mod_base="OTHER" /note="2'-OMe-nucleotide"
  modified_base 18..18: /mod_base="OTHER" /note="2'-OMe-nucleotide"
  modified_base 19..19: /mod_base="OTHER" /note="2'-OMe-nucleotide"
  misc_feature 19..20: /note="phosphorothioate bond"
  modified_base 20..20: /mod_base="OTHER" /note="2'-OMe-nucleotide"
  misc_feature 20..21: /note="phosphorothioate bond"
  modified_base 21..21: /mod_base="OTHER" /note="2'-OMe-nucleotide"
ucucuuaaggauuuaauacaa

SEQ ID NO: 1098 - DNA, 21 bp, Artificial Sequence
  Description of Artificial Sequence: Synthetic oligonucleotide
  Description of Combined DNA/RNA Molecule: Synthetic oligonucleotide
  N-term hydroxyl group
  C-term hydroxyl group
  modified_base 1..1: /mod_base="OTHER" /note="2'-fluoro-nucleotide"
  misc_feature 1..2: /note="phosphorothioate bond"
  modified_base 2..2: /mod_base="OTHER" /note="2'-fluoro-nucleotide"
  misc_feature 2..3: /note="phosphorothioate bond"
  modified_base 3..3: /mod_base="OTHER" /note="2'-OMe-nucleotide"
  modified_base 4..4: /mod_base="OTHER" /note="2'-fluoro-nucleotide"
  modified_base 5..5: /mod_base="OTHER" /note="2'-OMe-nucleotide"
  modified_base 6..6: /mod_base="OTHER" /note="2'-fluoro-nucleotide"
  modified_base 7..7: /mod_base="OTHER" /note="2'-OMe-nucleotide"
  modified_base 8..8: /mod_base="OTHER" /note="2'-fluoro-nucleotide"
  modified_base 9..9: /mod_base="OTHER" /note="2'-OMe-nucleotide"
  modified_base 10..10: /mod_base="OTHER" /note="2'-fluoro-nucleotide"
  modified_base 11..11: /mod_base="OTHER" /note="2'-OMe-nucleotide"
  modified_base 12..12: /mod_base="OTHER" /note="2'-OMe-nucleotide"
  modified_base 13..13: /mod_base="OTHER" /note="2'-OMe-nucleotide"
  modified_base 14..14: /mod_base="OTHER" /note="2'-fluoro-nucleotide"
  modified_base 15..15: /mod_base="OTHER" /note="2'-OMe-nucleotide"
  modified_base 16..16: /mod_base="OTHER" /note="2'-fluoro-nucleotide"
  modified_base 17..17: /mod_base="OTHER" /note="2'-OMe-nucleotide"
  modified_base 18..18: /mod_base="OTHER" /note="2'-fluoro-nucleotide"
  modified_base 19..19: /mod_base="OTHER" /note="2'-OMe-nucleotide"
  misc_feature 19..20: /note="phosphorothioate bond"
  modified_base 20..20: /mod_base="OTHER" /note="dT"
  misc_feature 20..21: /note="phosphorothioate bond"
  modified_base 21..21: /mod_base="OTHER" /note="dT"
ucucuuaaggauuuaauactt

SEQ ID NO: 1099 - RNA, 21 nt, Artificial Sequence
  Description of Artificial Sequence: Synthetic oligonucleotide
  N-term hydroxyl group
  C-term hydroxyl group
  modified_base 1..1: /mod_base="OTHER" /note="2'-OMe-nucleotide"
  misc_feature 1..2: /note="phosphorothioate bond"
  modified_base 2..2: /mod_base="OTHER" /note="2'-fluoro-nucleotide"
  misc_feature 2..3: /note="phosphorothioate bond"
  modified_base 3..3: /mod_base="OTHER" /note="2'-OMe-nucleotide"
  modified_base 4..4: /mod_base="OTHER" /note="2'-fluoro-nucleotide"
  modified_base 5..5: /mod_base="OTHER" /note="2'-OMe-nucleotide"
  modified_base 6..6: /mod_base="OTHER" /note="2'-OMe-nucleotide"
  modified_base 7..7: /mod_base="OTHER" /note="2'-OMe-nucleotide"
  modified_base 8..8: /mod_base="OTHER" /note="2'-OMe-nucleotide"
  modified_base 9..9: /mod_base="OTHER" /note="2'-OMe-nucleotide"
  modified_base 10..10: /mod_base="OTHER" /note="2'-OMe-nucleotide"
  modified_base 11..11: /mod_base="OTHER" /note="2'-OMe-nucleotide"
  modified_base 12..12: /mod_base="OTHER" /note="2'-OMe-nucleotide"
  modified_base 13..13: /mod_base="OTHER" /note="2'-OMe-nucleotide"
  modified_base 14..14: /mod_base="OTHER" /note="2'-fluoro-nucleotide"
  modified_base 15..15: /mod_base="OTHER" /note="2'-OMe-nucleotide"
  modified_base 16..16: /mod_base="OTHER" /note="2'-fluoro-nucleotide"
  modified_base 17..17: /mod_base="OTHER" /note="2'-OMe-nucleotide"
  modified_base 18..18: /mod_base="OTHER" /note="2'-OMe-nucleotide"
  modified_base 19..19: /mod_base="OTHER" /note="2'-OMe-nucleotide"
  misc_feature 19..20: /note="phosphorothioate bond"
  modified_base 20..20: /mod_base="OTHER" /note="2'-OMe-nucleotide"
  misc_feature 20..21: /note="phosphorothioate bond"
  modified_base 21..21: /mod_base="OTHER" /note="2'-OMe-nucleotide"
ucucuuaaggauuuaauacaa

SEQ ID NO: 1100 - RNA, 21 nt, Artificial Sequence
  Description of Artificial Sequence: Synthetic oligonucleotide
  N-term hydroxyl group
  C-term hydroxyl group
  modified_base 1..1: /mod_base="OTHER" /note="2'-OMe-nucleotide"
  misc_feature 1..2: /note="phosphorothioate bond"
  modified_base 2..2: /mod_base="OTHER" /note="2'-fluoro-nucleotide"
  misc_feature 2..3: /note="phosphorothioate bond"
  modified_base 3..3: /mod_base="OTHER" /note="2'-OMe-nucleotide"
  modified_base 4..4: /mod_base="OTHER" /note="2'-OMe-nucleotide"
  modified_base 5..5: /mod_base="OTHER" /note="2'-OMe-nucleotide"
  modified_base 6..6: /mod_base="OTHER" /note="2'-fluoro-nucleotide"
  modified_base 7..7: /mod_base="OTHER" /note="2'-OMe-nucleotide"
  modified_base 8..8: /mod_base="OTHER" /note="2'-OMe-nucleotide"
  modified_base 9..9: /mod_base="OTHER" /note="2'-OMe-nucleotide"
  modified_base 10..10: /mod_base="OTHER" /note="2'-OMe-nucleotide"
  modified_base 11..11: /mod_base="OTHER" /note="2'-OMe-nucleotide"
  modified_base 12..12: /mod_base="OTHER" /note="2'-OMe-nucleotide"
  modified_base 13..13: /mod_base="OTHER" /note="2'-OMe-nucleotide"
  modified_base 14..14: /mod_base="OTHER" /note="2'-fluoro-nucleotide"
  modified_base 15..15: /mod_base="OTHER" /note="2'-OMe-nucleotide"
  modified_base 16..16: /mod_base="OTHER" /note="2'-fluoro-nucleotide"
  modified_base 17..17: /mod_base="OTHER" /note="2'-OMe-nucleotide"
  modified_base 18..18: /mod_base="OTHER" /note="2'-OMe-nucleotide"
  modified_base 19..19: /mod_base="OTHER" /note="2'-OMe-nucleotide"
  misc_feature 19..20: /note="phosphorothioate bond"
  modified_base 20..20: /mod_base="OTHER" /note="2'-OMe-nucleotide"
  misc_feature 20..21: /note="phosphorothioate bond"
  modified_base 21..21: /mod_base="OTHER" /note="2'-OMe-nucleotide"
ucucuuaaggauuuaauacaa

SEQ ID NO: 1101 - RNA, 21 nt, Artificial Sequence
  Description of Artificial Sequence: Synthetic oligonucleotide
  N-term hydroxyl group
  C-term hydroxyl group
  modified_base 1..1: /mod_base="OTHER" /note="2'-OMe-nucleotide"
  misc_feature 1..2: /note="phosphorothioate bond"
  modified_base 2..2: /mod_base="OTHER" /note="2'-fluoro-nucleotide"
  misc_feature 2..3: /note="phosphorothioate bond"
  modified_base 3..3: /mod_base="OTHER" /note="2'-OMe-nucleotide"
  modified_base 4..4: /mod_base="OTHER" /note="2'-fluoro-nucleotide"
  modified_base 5..5: /mod_base="OTHER" /note="2'-OMe-nucleotide"
  modified_base 6..6: /mod_base="OTHER" /note="2'-OMe-nucleotide"
  modified_base 7..7: /mod_base="OTHER" /note="2'-OMe-nucleotide"
  modified_base 8..8: /mod_base="OTHER" /note="2'-fluoro-nucleotide"
  modified_base 9..9: /mod_base="OTHER" /note="2'-OMe-nucleotide"
  modified_base 10..10: /mod_base="OTHER" /note="2'-OMe-nucleotide"
  modified_base 11..11: /mod_base="OTHER" /note="2'-OMe-nucleotide"
  modified_base 12..12: /mod_base="OTHER" /note="2'-OMe-nucleotide"
  modified_base 13..13: /mod_base="OTHER" /note="2'-OMe-nucleotide"
  modified_base 14..14: /mod_base="OTHER" /note="2'-fluoro-nucleotide"
  modified_base 15..15: /mod_base="OTHER" /note="2'-OMe-nucleotide"
  modified_base 16..16: /mod_base="OTHER" /note="2'-fluoro-nucleotide"
  modified_base 17..17: /mod_base="OTHER" /note="2'-OMe-nucleotide"
  modified_base 18..18: /mod_base="OTHER" /note="2'-OMe-nucleotide"
  modified_base 19..19: /mod_base="OTHER" /note="2'-OMe-nucleotide"
  misc_feature 19..20: /note="phosphorothioate bond"
  modified_base 20..20: /mod_base="OTHER" /note="2'-OMe-nucleotide"
  misc_feature 20..21: /note="phosphorothioate bond"
  modified_base 21..21: /mod_base="OTHER" /note="2'-OMe-nucleotide"
ucucuuaaggauuuaauacaa

SEQ ID NO: 1102 - RNA, 21 nt, Artificial Sequence
  Description of Artificial Sequence: Synthetic oligonucleotide
  N-term hydroxyl group
  C-term hydroxyl group
  modified_base 1..1: /mod_base="OTHER" /note="2'-OMe-nucleotide"
  misc_feature 1..2: /note="phosphorothioate bond"
  modified_base 2..2: /mod_base="OTHER" /note="2'-fluoro-nucleotide"
  misc_feature 2..3: /note="phosphorothioate bond"
  modified_base 3..3: /mod_base="OTHER" /note="2'-OMe-nucleotide"
  modified_base 4..4: /mod_base="OTHER" /note="2'-OMe-nucleotide"
  modified_base 5..5: /mod_base="OTHER" /note="2'-OMe-nucleotide"
  modified_base 6..6: /mod_base="OTHER" /note="2'-OMe-nucleotide"
  modified_base 7..7: /mod_base="OTHER" /note="2'-OMe-nucleotide"
  modified_base 8..8: /mod_base="OTHER" /note="2'-fluoro-nucleotide"
  modified_base 9..9: /mod_base="OTHER" /note="2'-OMe-nucleotide"
  modified_base 10..10: /mod_base="OTHER" /note="2'-OMe-nucleotide"
  modified_base 11..11: /mod_base="OTHER" /note="2'-OMe-nucleotide"
  modified_base 12..12: /mod_base="OTHER" /note="2'-OMe-nucleotide"
  modified_base 13..13: /mod_base="OTHER" /note="2'-OMe-nucleotide"
  modified_base 14..14: /mod_base="OTHER" /note="2'-fluoro-nucleotide"
  modified_base 15..15: /mod_base="OTHER" /note="2'-OMe-nucleotide"
  modified_base 16..16: /mod_base="OTHER" /note="2'-fluoro-nucleotide"
  modified_base 17..17: /mod_base="OTHER" /note="2'-OMe-nucleotide"
  modified_base 18..18: /mod_base="OTHER" /note="2'-OMe-nucleotide"
  modified_base 19..19: /mod_base="OTHER" /note="2'-OMe-nucleotide"
  misc_feature 19..20: /note="phosphorothioate bond"
  modified_base 20..20: /mod_base="OTHER" /note="2'-OMe-nucleotide"
  misc_feature 20..21: /note="phosphorothioate bond"
  modified_base 21..21: /mod_base="OTHER" /note="2'-OMe-nucleotide"
ucucuuaaggauuuaauacaa

SEQ ID NO: 1103 - DNA, 21 bp, Artificial Sequence
  Description of Artificial Sequence: Synthetic oligonucleotide
  Description of Combined DNA/RNA Molecule: Synthetic oligonucleotide
  N-term hydroxyl group
  C-term hydroxyl group
  modified_base 1..1: /mod_base="OTHER" /note="2'-fluoro-nucleotide"
  misc_feature 1..2: /note="phosphorothioate bond"
  modified_base 2..2: /mod_base="OTHER" /note="2'-fluoro-nucleotide"
  misc_feature 2..3: /note="phosphorothioate bond"
  modified_base 3..3: /mod_base="OTHER" /note="2'-OMe-nucleotide"
  modified_base 4..4: /mod_base="OTHER" /note="2'-fluoro-nucleotide"
  modified_base 5..5: /mod_base="OTHER" /note="2'-OMe-nucleotide"
  modified_base 6..6: /mod_base="OTHER" /note="2'-fluoro-nucleotide"
  modified_base 7..7: /mod_base="OTHER" /note="2'-OMe-nucleotide"
  modified_base 8..8: /mod_base="OTHER" /note="2'-fluoro-nucleotide"
  modified_base 9..9: /mod_base="OTHER" /note="2'-OMe-nucleotide"
  modified_base 10..10: /mod_base="OTHER" /note="2'-OMe-nucleotide"
  modified_base 11..11: /mod_base="OTHER" /note="2'-OMe-nucleotide"
  modified_base 12..12: /mod_base="OTHER" /note="2'-fluoro-nucleotide"
  modified_base 13..13: /mod_base="OTHER" /note="2'-OMe-nucleotide"
  modified_base 14..14: /mod_base="OTHER" /note="2'-fluoro-nucleotide"
  modified_base 15..15: /mod_base="OTHER" /note="2'-OMe-nucleotide"
  modified_base 16..16: /mod_base="OTHER" /note="2'-fluoro-nucleotide"
  modified_base 17..17: /mod_base="OTHER" /note="2'-OMe-nucleotide"
  modified_base 18..18: /mod_base="OTHER" /note="2'-fluoro-nucleotide"
  modified_base 19..19: /mod_base="OTHER" /note="2'-OMe-nucleotide"
  misc_feature 19..20: /note="phosphorothioate bond"
  modified_base 20..20: /mod_base="OTHER" /note="dT"
  misc_feature 20..21: /note="phosphorothioate bond"
  modified_base 21..21: /mod_base="OTHER" /note="dT"
ucucuuaaggauuuaauactt

SEQ ID NO: 1104 - RNA, 21 nt, Artificial Sequence
  Description of Artificial Sequence: Synthetic oligonucleotide
  N-term hydroxyl group
  C-term hydroxyl group
  modified_base 1..1: /mod_base="OTHER" /note="2'-OMe-nucleotide"
  misc_feature 1..2: /note="phosphorothioate bond"
  modified_base 2..2: /mod_base="OTHER" /note="2'-fluoro-nucleotide"
  misc_feature 2..3: /note="phosphorothioate bond"
  modified_base 3..3: /mod_base="OTHER" /note="2'-OMe-nucleotide"
  modified_base 4..4: /mod_base="OTHER" /note="2'-fluoro-nucleotide"
  modified_base 5..5: /mod_base="OTHER" /note="2'-OMe-nucleotide"
  modified_base 6..6: /mod_base="OTHER" /note="2'-OMe-nucleotide"
  modified_base 7..7: /mod_base="OTHER" /note="2'-OMe-nucleotide"
  modified_base 8..8: /mod_base="OTHER" /note="2'-OMe-nucleotide"
  modified_base 9..9: /mod_base="OTHER" /note="2'-OMe-nucleotide"
  modified_base 10..10: /mod_base="OTHER" /note="2'-OMe-nucleotide"
  modified_base 11..11: /mod_base="OTHER" /note="2'-OMe-nucleotide"
  modified_base 12..12: /mod_base="OTHER" /note="2'-OMe-nucleotide"
  modified_base 13..13: /mod_base="OTHER" /note="2'-OMe-nucleotide"
  modified_base 14..14: /mod_base="OTHER" /note="2'-fluoro-nucleotide"
  modified_base 15..15: /mod_base="OTHER" /note="2'-OMe-nucleotide"
  modified_base 16..16: /mod_base="OTHER" /note="2'-fluoro-nucleotide"
  modified_base 17..17: /mod_base="OTHER" /note="2'-OMe-nucleotide"
  modified_base 18..18: /mod_base="OTHER" /note="2'-OMe-nucleotide"
  modified_base 19..19: /mod_base="OTHER" /note="2'-OMe-nucleotide"
  misc_feature 19..20: /note="phosphorothioate bond"
  modified_base 20..20: /mod_base="OTHER" /note="2'-OMe-nucleotide"
  misc_feature 20..21: /note="phosphorothioate bond"
  modified_base 21..21: /mod_base="OTHER" /note="2'-OMe-nucleotide"
ucucuuaaggauuuaauacaa

SEQ ID NO: 1105 - RNA, 21 nt, Artificial Sequence
  Description of Artificial Sequence: Synthetic oligonucleotide
  N-term hydroxyl group
  C-term hydroxyl group
  modified_base 1..1: /mod_base="OTHER" /note="2'-OMe-nucleotide"
  misc_feature 1..2: /note="phosphorothioate bond"
  modified_base 2..2: /mod_base="OTHER" /note="2'-fluoro-nucleotide"
  misc_feature 2..3: /note="phosphorothioate bond"
  modified_base 3..3: /mod_base="OTHER" /note="2'-OMe-nucleotide"
  modified_base 4..4: /mod_base="OTHER" /note="2'-OMe-nucleotide"
  modified_base 5..5: /mod_base="OTHER" /note="2'-OMe-nucleotide"
  modified_base 6..6: /mod_base="OTHER" /note="2'-fluoro-nucleotide"
  modified_base 7..7: /mod_base="OTHER" /note="2'-OMe-nucleotide"
  modified_base 8..8: /mod_base="OTHER" /note="2'-OMe-nucleotide"
  modified_base 9..9: /mod_base="OTHER" /note="2'-OMe-nucleotide"
  modified_base 10..10: /mod_base="OTHER" /note="2'-OMe-nucleotide"
  modified_base 11..11: /mod_base="OTHER" /note="2'-OMe-nucleotide"
  modified_base 12..12: /mod_base="OTHER" /note="2'-OMe-nucleotide"
  modified_base 13..13: /mod_base="OTHER" /note="2'-OMe-nucleotide"
  modified_base 14..14: /mod_base="OTHER" /note="2'-fluoro-nucleotide"
  modified_base 15..15: /mod_base="OTHER" /note="2'-OMe-nucleotide"
  modified_base 16..16: /mod_base="OTHER" /note="2'-fluoro-nucleotide"
  modified_base 17..17: /mod_base="OTHER" /note="2'-OMe-nucleotide"
  modified_base 18..18: /mod_base="OTHER" /note="2'-OMe-nucleotide"
  modified_base 19..19: /mod_base="OTHER" /note="2'-OMe-nucleotide"
  misc_feature 19..20: /note="phosphorothioate bond"
  modified_base 20..20: /mod_base="OTHER" /note="2'-OMe-nucleotide"
  misc_feature 20..21: /note="phosphorothioate bond"
  modified_base 21..21: /mod_base="OTHER" /note="2'-OMe-nucleotide"
ucucuuaaggauuuaauacaa

SEQ ID NO: 1106 - RNA, 21 nt, Artificial Sequence
  Description of Artificial Sequence: Synthetic oligonucleotide
  N-term hydroxyl group
  C-term hydroxyl group
  modified_base 1..1: /mod_base="OTHER" /note="2'-OMe-nucleotide"
  misc_feature 1..2: /note="phosphorothioate bond"
  modified_base 2..2: /mod_base="OTHER" /note="2'-fluoro-nucleotide"
  misc_feature 2..3: /note="phosphorothioate bond"
  modified_base 3..3: /mod_base="OTHER" /note="2'-OMe-nucleotide"
  modified_base 4..4: /mod_base="OTHER" /note="2'-fluoro-nucleotide"
  modified_base 5..5: /mod_base="OTHER" /note="2'-OMe-nucleotide"
  modified_base 6..6: /mod_base="OTHER" /note="2'-OMe-nucleotide"
  modified_base 7..7: /mod_base="OTHER" /note="2'-OMe-nucleotide"
  modified_base 8..8: /mod_base="OTHER" /note="2'-fluoro-nucleotide"
  modified_base 9..9: /mod_base="OTHER" /note="2'-OMe-nucleotide"
  modified_base 10..10: /mod_base="OTHER" /note="2'-OMe-nucleotide"
  modified_base 11..11: /mod_base="OTHER" /note="2'-OMe-nucleotide"
  modified_base 12..12: /mod_base="OTHER" /note="2'-OMe-nucleotide"
  modified_base 13..13: /mod_base="OTHER" /note="2'-OMe-nucleotide"
  modified_base 14..14: /mod_base="OTHER" /note="2'-fluoro-nucleotide"
  modified_base 15..15: /mod_base="OTHER" /note="2'-OMe-nucleotide"
  modified_base 16..16: /mod_base="OTHER" /note="2'-fluoro-nucleotide"
  modified_base 17..17: /mod_base="OTHER" /note="2'-OMe-nucleotide"
  modified_base 18..18: /mod_base="OTHER" /note="2'-OMe-nucleotide"
  modified_base 19..19: /mod_base="OTHER" /note="2'-OMe-nucleotide"
  misc_feature 19..20: /note="phosphorothioate bond"
  modified_base 20..20: /mod_base="OTHER" /note="2'-OMe-nucleotide"
  misc_feature 20..21: /note="phosphorothioate bond"
  modified_base 21..21: /mod_base="OTHER" /note="2'-OMe-nucleotide"
ucucuuaaggauuuaauacaa

SEQ ID NO: 1107 - RNA, 21 nt, Artificial Sequence
  Description of Artificial Sequence: Synthetic oligonucleotide
  N-term hydroxyl group
  C-term hydroxyl group
  modified_base 1..1: /mod_base="OTHER" /note="2'-OMe-nucleotide"
  misc_feature 1..2: /note="phosphorothioate bond"
  modified_base 2..2: /mod_base="OTHER" /note="2'-fluoro-nucleotide"
  misc_feature 2..3: /note="phosphorothioate bond"
  modified_base 3..3: /mod_base="OTHER" /note="2'-OMe-nucleotide"
  modified_base 4..4: /mod_base="OTHER" /note="2'-OMe-nucleotide"
  modified_base 5..5: /mod_base="OTHER" /note="2'-OMe-nucleotide"
  modified_base 6..6: /mod_base="OTHER" /note="2'-OMe-nucleotide"
  modified_base 7..7: /mod_base="OTHER" /note="2'-OMe-nucleotide"
  modified_base 8..8: /mod_base="OTHER" /note="2'-fluoro-nucleotide"
  modified_base 9..9: /mod_base="OTHER" /note="2'-OMe-nucleotide"
  modified_base 10..10: /mod_base="OTHER" /note="2'-OMe-nucleotide"
  modified_base 11..11: /mod_base="OTHER" /note="2'-OMe-nucleotide"
  modified_base 12..12: /mod_base="OTHER" /note="2'-OMe-nucleotide"
  modified_base 13..13: /mod_base="OTHER" /note="2'-OMe-nucleotide"
  modified_base 14..14: /mod_base="OTHER" /note="2'-fluoro-nucleotide"
  modified_base 15..15: /mod_base="OTHER" /note="2'-OMe-nucleotide"
  modified_base 16..16: /mod_base="OTHER" /note="2'-fluoro-nucleotide"
  modified_base 17..17: /mod_base="OTHER" /note="2'-OMe-nucleotide"
  modified_base 18..18: /mod_base="OTHER" /note="2'-OMe-nucleotide"
  modified_base 19..19: /mod_base="OTHER" /note="2'-OMe-nucleotide"
  misc_feature 19..20: /note="phosphorothioate bond"
  modified_base 20..20: /mod_base="OTHER" /note="2'-OMe-nucleotide"
  misc_feature 20..21: /note="phosphorothioate bond"
  modified_base 21..21: /mod_base="OTHER" /note="2'-OMe-nucleotide"
ucucuuaaggauuuaauacaa

SEQ ID NO: 1108 - DNA, 21 bp, Artificial Sequence
  Description of Artificial Sequence: Synthetic oligonucleotide
  Description of Combined DNA/RNA Molecule: Synthetic oligonucleotide
  N-term hydroxyl group
  C-term hydroxyl group
  modified_base 1..1: /mod_base="OTHER" /note="2'-fluoro-nucleotide"
  misc_feature 1..2: /note="phosphorothioate bond"
  modified_base 2..2: /mod_base="OTHER" /note="2'-fluoro-nucleotide"
  misc_feature 2..3: /note="phosphorothioate bond"
  modified_base 3..3: /mod_base="OTHER" /note="2'-OMe-nucleotide"
  modified_base 4..4: /mod_base="OTHER" /note="2'-fluoro-nucleotide"
  modified_base 5..5: /mod_base="OTHER" /note="2'-OMe-nucleotide"
  modified_base 6..6: /mod_base="OTHER" /note="2'-fluoro-nucleotide"
  modified_base 7..7: /mod_base="OTHER" /note="2'-OMe-nucleotide"
  modified_base 8..8: /mod_base="OTHER" /note="2'-fluoro-nucleotide"
  modified_base 9..9: /mod_base="OTHER" /note="2'-OMe-nucleotide"
  modified_base 10..10: /mod_base="OTHER" /note="2'-OMe-nucleotide"
  modified_base 11..11: /mod_base="OTHER" /note="2'-OMe-nucleotide"
  modified_base 12..12: /mod_base="OTHER" /note="2'-fluoro-nucleotide"
  modified_base 13..13: /mod_base="OTHER" /note="2'-OMe-nucleotide"
  modified_base 14..14: /mod_base="OTHER" /note="2'-fluoro-nucleotide"
  modified_base 15..15: /mod_base="OTHER" /note="2'-OMe-nucleotide"
  modified_base 16..16: /mod_base="OTHER" /note="2'-fluoro-nucleotide"
  modified_base 17..17: /mod_base="OTHER" /note="2'-OMe-nucleotide"
  modified_base 18..18: /mod_base="OTHER" /note="2'-fluoro-nucleotide"
  modified_base 19..19: /mod_base="OTHER" /note="2'-OMe-nucleotide"
  misc_feature 19..20: /note="phosphorothioate bond"
  modified_base 20..20: /mod_base="OTHER" /note="dT"
  misc_feature 20..21: /note="phosphorothioate bond"
  modified_base 21..21: /mod_base="OTHER" /note="dT"
ucucuuaaggauuuaauactt

SEQ ID NO: 1109 - RNA, 21 nt, Artificial Sequence
  Description of Artificial Sequence: Synthetic oligonucleotide
  N-term hydroxyl group
  C-term hydroxyl group
  modified_base 1..1: /mod_base="OTHER" /note="2'-OMe-nucleotide"
  misc_feature 1..2: /note="phosphorothioate bond"
  modified_base 2..2: /mod_base="OTHER" /note="2'-fluoro-nucleotide"
  misc_feature 2..3: /note="phosphorothioate bond"
  modified_base 3..3: /mod_base="OTHER" /note="2'-OMe-nucleotide"
  modified_base 4..4: /mod_base="OTHER" /note="2'-fluoro-nucleotide"
  modified_base 5..5: /mod_base="OTHER" /note="2'-OMe-nucleotide"
  modified_base 6..6: /mod_base="OTHER" /note="2'-OMe-nucleotide"
  modified_base 7..7: /mod_base="OTHER" /note="2'-OMe-nucleotide"
  modified_base 8..8: /mod_base="OTHER" /note="2'-OMe-nucleotide"
  modified_base 9..9: /mod_base="OTHER" /note="2'-OMe-nucleotide"
  modified_base 10..10: /mod_base="OTHER" /note="2'-OMe-nucleotide"
  modified_base 11..11: /mod_base="OTHER" /note="2'-OMe-nucleotide"
  modified_base 12..12: /mod_base="OTHER" /note="2'-OMe-nucleotide"
  modified_base 13..13: /mod_base="OTHER" /note="2'-OMe-nucleotide"
  modified_base 14..14: /mod_base="OTHER" /note="2'-fluoro-nucleotide"
  modified_base 15..15: /mod_base="OTHER" /note="2'-OMe-nucleotide"
  modified_base 16..16: /mod_base="OTHER" /note="2'-fluoro-nucleotide"
  modified_base 17..17: /mod_base="OTHER" /note="2'-OMe-nucleotide"
  modified_base 18..18: /mod_base="OTHER" /note="2'-OMe-nucleotide"
  modified_base 19..19: /mod_base="OTHER" /note="2'-OMe-nucleotide"
  misc_feature 19..20: /note="phosphorothioate bond"
  modified_base 20..20: /mod_base="OTHER" /note="2'-OMe-nucleotide"
  misc_feature 20..21: /note="phosphorothioate bond"
  modified_base 21..21: /mod_base="OTHER" /note="2'-OMe-nucleotide"
ucucuuaaggauuuaauacaa

SEQ ID NO: 1110 - RNA, 21 nt, Artificial Sequence
  Description of Artificial Sequence: Synthetic oligonucleotide
  N-term hydroxyl group
  C-term hydroxyl group
  modified_base 1..1: /mod_base="OTHER" /note="2'-OMe-nucleotide"
  misc_feature 1..2: /note="phosphorothioate bond"
  modified_base 2..2: /mod_base="OTHER" /note="2'-fluoro-nucleotide"
  misc_feature 2..3: /note="phosphorothioate bond"
  modified_base 3..3: /mod_base="OTHER" /note="2'-OMe-nucleotide"
  modified_base 4..4: /mod_base="OTHER" /note="2'-OMe-nucleotide"
  modified_base 5..5: /mod_base="OTHER" /note="2'-OMe-nucleotide"
  modified_base 6..6: /mod_base="OTHER" /note="2'-fluoro-nucleotide"
  modified_base 7..7: /mod_base="OTHER" /note="2'-OMe-nucleotide"
  modified_base 8..8: /mod_base="OTHER" /note="2'-OMe-nucleotide"
  modified_base 9..9: /mod_base="OTHER" /note="2'-OMe-nucleotide"
  modified_base 10..10: /mod_base="OTHER" /note="2'-OMe-nucleotide"
  modified_base 11..11: /mod_base="OTHER" /note="2'-OMe-nucleotide"
  modified_base 12..12: /mod_base="OTHER" /note="2'-OMe-nucleotide"
  modified_base 13..13: /mod_base="OTHER" /note="2'-OMe-nucleotide"
  modified_base 14..14: /mod_base="OTHER" /note="2'-fluoro-nucleotide"
  modified_base 15..15: /mod_base="OTHER" /note="2'-OMe-nucleotide"
  modified_base 16..16: /mod_base="OTHER" /note="2'-fluoro-nucleotide"
  modified_base 17..17: /mod_base="OTHER" /note="2'-OMe-nucleotide"
  modified_base 18..18: /mod_base="OTHER" /note="2'-OMe-nucleotide"
  modified_base 19..19: /mod_base="OTHER" /note="2'-OMe-nucleotide"
  misc_feature 19..20: /note="phosphorothioate bond"
  modified_base 20..20: /mod_base="OTHER" /note="2'-OMe-nucleotide"
  misc_feature 20..21: /note="phosphorothioate bond"
  modified_base 21..21: /mod_base="OTHER" /note="2'-OMe-nucleotide"
ucucuuaaggauuuaauacaa

SEQ ID NO: 1111 - RNA, 21 nt, Artificial Sequence
  Description of Artificial Sequence: Synthetic oligonucleotide
  N-term hydroxyl group
  C-term hydroxyl group
  modified_base 1..1: /mod_base="OTHER" /note="2'-OMe-nucleotide"
  misc_feature 1..2: /note="phosphorothioate bond"
  modified_base 2..2: /mod_base="OTHER" /note="2'-fluoro-nucleotide"
  misc_feature 2..3: /note="phosphorothioate bond"
  modified_base 3..3: /mod_base="OTHER" /note="2'-OMe-nucleotide"
  modified_base 4..4: /mod_base="OTHER" /note="2'-fluoro-nucleotide"
  modified_base 5..5: /mod_base="OTHER" /note="2'-OMe-nucleotide"
  modified_base 6..6: /mod_base="OTHER" /note="2'-OMe-nucleotide"
  modified_base 7..7: /mod_base="OTHER" /note="2'-OMe-nucleotide"
  modified_base 8..8: /mod_base="OTHER" /note="2'-OMe-nucleotide"
  modified_base 9..9: /mod_base="OTHER" /note="2'-fluoro-nucleotide"
  modified_base 10..10: /mod_base="OTHER" /note="2'-OMe-nucleotide"
  modified_base 11..11: /mod_base="OTHER" /note="2'-OMe-nucleotide"
  modified_base 12..12: /mod_base="OTHER" /note="2'-OMe-nucleotide"
  modified_base 13..13: /mod_base="OTHER" /note="2'-OMe-nucleotide"
  modified_base 14..14: /mod_base="OTHER" /note="2'-fluoro-nucleotide"
  modified_base 15..15: /mod_base="OTHER" /note="2'-OMe-nucleotide"
  modified_base 16..16: /mod_base="OTHER" /note="2'-fluoro-nucleotide"
  modified_base 17..17: /mod_base="OTHER" /note="2'-OMe-nucleotide"
  modified_base 18..18: /mod_base="OTHER" /note="2'-OMe-nucleotide"
  modified_base 19..19: /mod_base="OTHER" /note="2'-OMe-nucleotide"
  misc_feature 19..20: /note="phosphorothioate bond"
  modified_base 20..20: /mod_base="OTHER" /note="2'-OMe-nucleotide"
  misc_feature 20..21: /note="phosphorothioate bond"
  modified_base 21..21: /mod_base="OTHER" /note="2'-OMe-nucleotide"
ucucuuaaggauuuaauacaa

SEQ ID NO: 1112 - DNA, 21 bp, Artificial Sequence
  Description of Artificial Sequence: Synthetic oligonucleotide
  Description of Combined DNA/RNA Molecule: Synthetic oligonucleotide
  N-term hydroxyl group
  C-term hydroxyl group
  modified_base 1..1: /mod_base="OTHER" /note="2'-fluoro-nucleotide"
  misc_feature 1..2: /note="phosphorothioate bond"
  modified_base 2..2: /mod_base="OTHER" /note="2'-fluoro-nucleotide"
  misc_feature 2..3: /note="phosphorothioate bond"
  modified_base 3..3: /mod_base="OTHER" /note="2'-OMe-nucleotide"
  modified_base 4..4: /mod_base="OTHER" /note="2'-fluoro-nucleotide"
  modified_base 5..5: /mod_base="OTHER" /note="2'-OMe-nucleotide"
  modified_base 6..6: /mod_base="OTHER" /note="2'-fluoro-nucleotide"
  modified_base 7..7: /mod_base="OTHER" /note="2'-OMe-nucleotide"
  modified_base 8..8: /mod_base="OTHER" /note="2'-fluoro-nucleotide"
  modified_base 9..9: /mod_base="OTHER" /note="2'-OMe-nucleotide"
  modified_base 10..10: /mod_base="OTHER" /note="2'-fluoro-nucleotide"
  modified_base 11..11: /mod_base="OTHER" /note="2'-OMe-nucleotide"
  modified_base 12..12: /mod_base="OTHER" /note="2'-OMe-nucleotide"
  modified_base 13..13: /mod_base="OTHER" /note="2'-OMe-nucleotide"
  modified_base 14..14: /mod_base="OTHER" /note="2'-fluoro-nucleotide"
  modified_base 15..15: /mod_base="OTHER" /note="2'-OMe-nucleotide"
  modified_base 16..16: /mod_base="OTHER" /note="2'-fluoro-nucleotide"
  modified_base 17..17: /mod_base="OTHER" /note="2'-OMe-nucleotide"
  modified_base 18..18: /mod_base="OTHER" /note="2'-fluoro-nucleotide"
  modified_base 19..19: /mod_base="OTHER" /note="2'-OMe-nucleotide"
  misc_feature 19..20: /note="phosphorothioate bond"
  modified_base 20..20: /mod_base="OTHER" /note="dT"
  misc_feature 20..21: /note="phosphorothioate bond"
  modified_base 21..21: /mod_base="OTHER" /note="dT"
ucucuuaaggauuuaauactt

SEQ ID NO: 1113 - RNA, 21 nt, Artificial Sequence
  Description of Artificial Sequence: Synthetic oligonucleotide
  N-term hydroxyl group
  C-term hydroxyl group
  modified_base 1..1: /mod_base="OTHER" /note="2'-OMe-nucleotide"
  misc_feature 1..2: /note="phosphorothioate bond"
  modified_base 2..2: /mod_base="OTHER" /note="2'-fluoro-nucleotide"
  misc_feature 2..3: /note="phosphorothioate bond"
  modified_base 3..3: /mod_base="OTHER" /note="2'-OMe-nucleotide"
  modified_base 4..4: /mod_base="OTHER" /note="2'-fluoro-nucleotide"
  modified_base 5..5: /mod_base="OTHER" /note="2'-OMe-nucleotide"
  modified_base 6..6: /mod_base="OTHER" /note="2'-OMe-nucleotide"
  modified_base 7..7: /mod_base="OTHER" /note="2'-OMe-nucleotide"
  modified_base 8..8: /mod_base="OTHER" /note="2'-OMe-nucleotide"
  modified_base 9..9: /mod_base="OTHER" /note="2'-OMe-nucleotide"
  modified_base 10..10: /mod_base="OTHER" /note="2'-OMe-nucleotide"
  modified_base 11..11: /mod_base="OTHER" /note="2'-OMe-nucleotide"
  modified_base 12..12: /mod_base="OTHER" /note="2'-OMe-nucleotide"
  modified_base 13..13: /mod_base="OTHER" /note="2'-OMe-nucleotide"
  modified_base 14..14: /mod_base="OTHER" /note="2'-fluoro-nucleotide"
  modified_base 15..15: /mod_base="OTHER" /note="2'-OMe-nucleotide"
  modified_base 16..16: /mod_base="OTHER" /note="2'-fluoro-nucleotide"
  modified_base 17..17: /mod_base="OTHER" /note="2'-OMe-nucleotide"
  modified_base 18..18: /mod_base="OTHER" /note="2'-OMe-nucleotide"
  modified_base 19..19: /mod_base="OTHER" /note="2'-OMe-nucleotide"
  misc_feature 19..20: /note="phosphorothioate bond"
  modified_base 20..20: /mod_base="OTHER" /note="2'-OMe-nucleotide"
  misc_feature 20..21: /note="phosphorothioate bond"
  modified_base 21..21: /mod_base="OTHER" /note="2'-OMe-nucleotide"
ucucuuaaggauuuaauacaa

SEQ ID NO: 1114 - RNA, 21 nt, Artificial Sequence
  Description of Artificial Sequence: Synthetic oligonucleotide
  N-term hydroxyl group
  C-term hydroxyl group
  modified_base 1..1: /mod_base="OTHER" /note="2'-OMe-nucleotide"
  misc_feature 1..2: /note="phosphorothioate bond"
  modified_base 2..2: /mod_base="OTHER" /note="2'-fluoro-nucleotide"
  misc_feature 2..3: /note="phosphorothioate bond"
  modified_base 3..3: /mod_base="OTHER" /note="2'-OMe-nucleotide"
  modified_base 4..4: /mod_base="OTHER" /note="2'-OMe-nucleotide"
  modified_base 5..5: /mod_base="OTHER" /note="2'-OMe-nucleotide"
  modified_base 6..6: /mod_base="OTHER" /note="2'-fluoro-nucleotide"
  modified_base 7..7: /mod_base="OTHER" /note="2'-OMe-nucleotide"
  modified_base 8..8: /mod_base="OTHER" /note="2'-OMe-nucleotide"
  modified_base 9..9: /mod_base="OTHER" /note="2'-OMe-nucleotide"
  modified_base 10..10: /mod_base="OTHER" /note="2'-OMe-nucleotide"
  modified_base 11..11: /mod_base="OTHER" /note="2'-OMe-nucleotide"
  modified_base 12..12: /mod_base="OTHER" /note="2'-OMe-nucleotide"
  modified_base 13..13: /mod_base="OTHER" /note="2'-OMe-nucleotide"
  modified_base 14..14: /mod_base="OTHER" /note="2'-fluoro-nucleotide"
  modified_base 15..15: /mod_base="OTHER" /note="2'-OMe-nucleotide"
  modified_base 16..16: /mod_base="OTHER" /note="2'-fluoro-nucleotide"
  modified_base 17..17: /mod_base="OTHER" /note="2'-OMe-nucleotide"
  modified_base 18..18: /mod_base="OTHER" /note="2'-OMe-nucleotide"
  modified_base 19..19: /mod_base="OTHER" /note="2'-OMe-nucleotide"
  misc_feature 19..20: /note="phosphorothioate bond"
  modified_base 20..20: /mod_base="OTHER" /note="2'-OMe-nucleotide"
  misc_feature 20..21: /note="phosphorothioate bond"
  modified_base 21..21: /mod_base="OTHER" /note="2'-OMe-nucleotide"
ucucuuaaggauuuaauacaa

SEQ ID NO: 1115 - RNA, 21 nt, Artificial Sequence
  Description of Artificial Sequence: Synthetic oligonucleotide
  N-term hydroxyl group
  C-term hydroxyl group
  modified_base 1..1: /mod_base="OTHER" /note="2'-OMe-nucleotide"
  misc_feature 1..2: /note="phosphorothioate bond"
  modified_base 2..2: /mod_base="OTHER" /note="2'-fluoro-nucleotide"
  misc_feature 2..3: /note="phosphorothioate bond"
  modified_base 3..3: /mod_base="OTHER" /note="2'-OMe-nucleotide"
  modified_base 4..4: /mod_base="OTHER" /note="2'-fluoro-nucleotide"
  modified_base 5..5: /mod_base="OTHER" /note="2'-OMe-nucleotide"
  modified_base 6..6: /mod_base="OTHER" /note="2'-OMe-nucleotide"
  modified_base 7..7: /mod_base="OTHER" /note="2'-OMe-nucleotide"
  modified_base 8..8: /mod_base="OTHER" /note="2'-OMe-nucleotide"
  modified_base 9..9: /mod_base="OTHER" /note="2'-fluoro-nucleotide"
  modified_base 10..10: /mod_base="OTHER" /note="2'-OMe-nucleotide"
  modified_base 11..11: /mod_base="OTHER" /note="2'-OMe-nucleotide"
  modified_base 12..12: /mod_base="OTHER" /note="2'-OMe-nucleotide"
  modified_base 13..13: /mod_base="OTHER" /note="2'-OMe-nucleotide"
  modified_base 14..14: /mod_base="OTHER" /note="2'-fluoro-nucleotide"
  modified_base 15..15: /mod_base="OTHER" /note="2'-OMe-nucleotide"
  modified_base 16..16: /mod_base="OTHER" /note="2'-fluoro-nucleotide"
  modified_base 17..17: /mod_base="OTHER" /note="2'-OMe-nucleotide"
  modified_base 18..18: /mod_base="OTHER" /note="2'-OMe-nucleotide"
  modified_base 19..19: /mod_base="OTHER" /note="2'-OMe-nucleotide"
  misc_feature 19..20: /note="phosphorothioate bond"
  modified_base 20..20: /mod_base="OTHER" /note="2'-OMe-nucleotide"
  misc_feature 20..21: /note="phosphorothioate bond"
  modified_base 21..21: /mod_base="OTHER" /note="2'-OMe-nucleotide"
ucucuuaaggauuuaauacaa

SEQ ID NO: 1116 - DNA, 21 bp, Artificial Sequence
  Description of Artificial Sequence: Synthetic oligonucleotide
  Description of Combined DNA/RNA Molecule: Synthetic oligonucleotide
  N-term hydroxyl group
  C-term hydroxyl group
  modified_base 1..1: /mod_base="OTHER" /note="2'-fluoro-nucleotide"
  misc_feature 1..2: /note="phosphorothioate bond"
  modified_base 2..2: /mod_base="OTHER" /note="2'-fluoro-nucleotide"
  misc_feature 2..3: /note="phosphorothioate bond"
  modified_base 3..3: /mod_base="OTHER" /note="2'-OMe-nucleotide"
  modified_base 4..4: /mod_base="OTHER" /note="2'-fluoro-nucleotide"
  modified_base 5..5: /mod_base="OTHER" /note="2'-OMe-nucleotide"
  modified_base 6..6: /mod_base="OTHER" /note="2'-fluoro-nucleotide"
  modified_base 7..7: /mod_base="OTHER" /note="2'-OMe-nucleotide"
  modified_base 8..8: /mod_base="OTHER" /note="2'-fluoro-nucleotide"
  modified_base 9..9: /mod_base="OTHER" /note="2'-OMe-nucleotide"
  modified_base 10..10: /mod_base="OTHER" /note="2'-fluoro-nucleotide"
  modified_base 11..11: /mod_base="OTHER" /note="2'-OMe-nucleotide"
  modified_base 12..12: /mod_base="OTHER" /note="2'-OMe-nucleotide"
  modified_base 13..13: /mod_base="OTHER" /note="2'-OMe-nucleotide"
  modified_base 14..14: /mod_base="OTHER" /note="2'-fluoro-nucleotide"
  modified_base 15..15: /mod_base="OTHER" /note="2'-OMe-nucleotide"
  modified_base 16..16: /mod_base="OTHER" /note="2'-fluoro-nucleotide"
  modified_base 17..17: /mod_base="OTHER" /note="2'-OMe-nucleotide"
  modified_base 18..18: /mod_base="OTHER" /note="2'-fluoro-nucleotide"
  modified_base 19..19: /mod_base="OTHER" /note="2'-OMe-nucleotide"
  misc_feature 19..20: /note="phosphorothioate bond"
  modified_base 20..20: /mod_base="OTHER" /note="dT"
  misc_feature 20..21: /note="phosphorothioate bond"
  modified_base 21..21: /mod_base="OTHER" /note="dT"
ucucuuaaggauuuaauactt

SEQ ID NO: 1117 - RNA, 21 nt, Artificial Sequence
  Description of Artificial Sequence: Synthetic oligonucleotide
  N-term hydroxyl group
  C-term hydroxyl group
  modified_base 1..1: /mod_base="OTHER" /note="2'-OMe-nucleotide"
  misc_feature 1..2: /note="phosphorothioate bond"
  modified_base 2..2: /mod_base="OTHER" /note="2'-fluoro-nucleotide"
  misc_feature 2..3: /note="phosphorothioate bond"
  modified_base 3..3: /mod_base="OTHER" /note="2'-OMe-nucleotide"
  modified_base 4..4: /mod_base="OTHER" /note="2'-fluoro-nucleotide"
  modified_base 5..5: /mod_base="OTHER" /note="2'-OMe-nucleotide"
  modified_base 6..6: /mod_base="OTHER" /note="2'-OMe-nucleotide"
  modified_base 7..7: /mod_base="OTHER" /note="2'-OMe-nucleotide"
  modified_base 8..8: /mod_base="OTHER" /note="2'-OMe-nucleotide"
  modified_base 9..9: /mod_base="OTHER" /note="2'-OMe-nucleotide"
  modified_base 10..10: /mod_base="OTHER" /note="2'-OMe-nucleotide"
  modified_base 11..11: /mod_base="OTHER" /note="2'-OMe-nucleotide"
  modified_base 12..12: /mod_base="OTHER" /note="2'-OMe-nucleotide"
  modified_base 13..13: /mod_base="OTHER" /note="2'-OMe-nucleotide"
  modified_base 14..14: /mod_base="OTHER" /note="2'-fluoro-nucleotide"
  modified_base 15..15: /mod_base="OTHER" /note="2'-OMe-nucleotide"
  modified_base 16..16: /mod_base="OTHER" /note="2'-fluoro-nucleotide"
  modified_base 17..17: /mod_base="OTHER" /note="2'-OMe-nucleotide"
  modified_base 18..18: /mod_base="OTHER" /note="2'-OMe-nucleotide"
  modified_base 19..19: /mod_base="OTHER" /note="2'-OMe-nucleotide"
  misc_feature 19..20: /note="phosphorothioate bond"
  modified_base 20..20: /mod_base="OTHER" /note="2'-OMe-nucleotide"
  misc_feature 20..21: /note="phosphorothioate bond"
  modified_base 21..21: /mod_base="OTHER" /note="2'-OMe-nucleotide"
ucucuuaaggauuuaauacaa

SEQ ID NO: 1118 - RNA, 21 nt, Artificial Sequence
  Description of Artificial Sequence: Synthetic oligonucleotide
  N-term hydroxyl group
  C-term hydroxyl group
  modified_base 1..1: /mod_base="OTHER" /note="2'-OMe-nucleotide"
  misc_feature 1..2: /note="phosphorothioate bond"
  modified_base 2..2: /mod_base="OTHER" /note="2'-fluoro-nucleotide"
  misc_feature 2..3: /note="phosphorothioate bond"
  modified_base 3..3: /mod_base="OTHER" /note="2'-OMe-nucleotide"
  modified_base 4..4: /mod_base="OTHER" /note="2'-OMe-nucleotide"
  modified_base 5..5: /mod_base="OTHER" /note="2'-OMe-nucleotide"
  modified_base 6..6: /mod_base="OTHER" /note="2'-fluoro-nucleotide"
  modified_base 7..7: /mod_base="OTHER" /note="2'-OMe-nucleotide"
  modified_base 8..8: /mod_base="OTHER" /note="2'-OMe-nucleotide"
  modified_base 9..9: /mod_base="OTHER" /note="2'-OMe-nucleotide"
  modified_base 10..10: /mod_base="OTHER" /note="2'-OMe-nucleotide"
  modified_base 11..11: /mod_base="OTHER" /note="2'-OMe-nucleotide"
  modified_base 12..12: /mod_base="OTHER" /note="2'-OMe-nucleotide"
  modified_base 13..13: /mod_base="OTHER" /note="2'-OMe-nucleotide"
  modified_base 14..14: /mod_base="OTHER" /note="2'-fluoro-nucleotide"
  modified_base 15..15: /mod_base="OTHER" /note="2'-OMe-nucleotide"
  modified_base 16..16: /mod_base="OTHER" /note="2'-fluoro-nucleotide"
  modified_base 17..17: /mod_base="OTHER" /note="2'-OMe-nucleotide"
  modified_base 18..18: /mod_base="OTHER" /note="2'-OMe-nucleotide"
  modified_base 19..19: /mod_base="OTHER" /note="2'-OMe-nucleotide"
  misc_feature 19..20: /note="phosphorothioate bond"
  modified_base 20..20: /mod_base="OTHER" /note="2'-OMe-nucleotide"
  misc_feature 20..21: /note="phosphorothioate bond"
  modified_base 21..21: /mod_base="OTHER" /note="2'-OMe-nucleotide"
ucucuuaaggauuuaauacaa

SEQ ID NO: 1119 - RNA, 21 nt, Artificial Sequence
  Description of Artificial Sequence: Synthetic oligonucleotide
  N-term hydroxyl group
  C-term hydroxyl group
  modified_base 1..1: /mod_base="OTHER" /note="2'-OMe-nucleotide"
  misc_feature 1..2: /note="phosphorothioate bond"
  modified_base 2..2: /mod_base="OTHER" /note="2'-fluoro-nucleotide"
  misc_feature 2..3: /note="phosphorothioate bond"
  modified_base 3..3: /mod_base="OTHER" /note="2'-OMe-nucleotide"
  modified_base 4..4: /mod_base="OTHER" /note="2'-fluoro-nucleotide"
  modified_base 5..5: /mod_base="OTHER" /note="2'-OMe-nucleotide"
  modified_base 6..6: /mod_base="OTHER" /note="2'-OMe-nucleotide"
  modified_base 7..7: /mod_base="OTHER" /note="2'-OMe-nucleotide"
  modified_base 8..8: /mod_base="OTHER" /note="2'-fluoro-nucleotide"
  modified_base 9..9: /mod_base="OTHER" /note="2'-OMe-nucleotide"
  modified_base 10..10: /mod_base="OTHER" /note="2'-OMe-nucleotide"
  modified_base 11..11: /mod_base="OTHER" /note="2'-OMe-nucleotide"
  modified_base 12..12: /mod_base="OTHER" /note="2'-OMe-nucleotide"
  modified_base 13..13: /mod_base="OTHER" /note="2'-OMe-nucleotide"
  modified_base 14..14: /mod_base="OTHER" /note="2'-fluoro-nucleotide"
  modified_base 15..15: /mod_base="OTHER" /note="2'-OMe-nucleotide"
  modified_base 16..16: /mod_base="OTHER" /note="2'-fluoro-nucleotide"
  modified_base 17..17: /mod_base="OTHER" /note="2'-OMe-nucleotide"
  modified_base 18..18: /mod_base="OTHER" /note="2'-OMe-nucleotide"
  modified_base 19..19: /mod_base="OTHER" /note="2'-OMe-nucleotide"
  misc_feature 19..20: /note="phosphorothioate bond"
  modified_base 20..20: /mod_base="OTHER" /note="2'-OMe-nucleotide"
  misc_feature 20..21: /note="phosphorothioate bond"
  modified_base 21..21: /mod_base="OTHER" /note="2'-OMe-nucleotide"
ucucuuaaggauuuaauacaa

SEQ ID NO: 1120 - RNA, 21 nt, Artificial Sequence
  Description of Artificial Sequence: Synthetic oligonucleotide
  N-term hydroxyl group
  C-term hydroxyl group
  modified_base 1..1: /mod_base="OTHER" /note="2'-OMe-nucleotide"
  misc_feature 1..2: /note="phosphorothioate bond"
  modified_base 2..2: /mod_base="OTHER" /note="2'-fluoro-nucleotide"
  misc_feature 2..3: /note="phosphorothioate bond"
  modified_base 3..3: /mod_base="OTHER" /note="2'-OMe-nucleotide"
  modified_base 4..4: /mod_base="OTHER" /note="2'-OMe-nucleotide"
  modified_base 5..5: /mod_base="OTHER" /note="2'-OMe-nucleotide"
  modified_base 6..6: /mod_base="OTHER" /note="2'-OMe-nucleotide"
  modified_base 7..7: /mod_base="OTHER" /note="2'-OMe-nucleotide"
  modified_base 8..8: /mod_base="OTHER" /note="2'-fluoro-nucleotide"
  modified_base 9..9: /mod_base="OTHER" /note="2'-OMe-nucleotide"
  modified_base 10..10: /mod_base="OTHER" /note="2'-OMe-nucleotide"
  modified_base 11..11: /mod_base="OTHER" /note="2'-OMe-nucleotide"
  modified_base 12..12: /mod_base="OTHER" /note="2'-OMe-nucleotide"
  modified_base 13..13: /mod_base="OTHER" /note="2'-OMe-nucleotide"
  modified_base 14..14: /mod_base="OTHER" /note="2'-fluoro-nucleotide"
  modified_base 15..15: /mod_base="OTHER" /note="2'-OMe-nucleotide"
  modified_base 16..16: /mod_base="OTHER" /note="2'-fluoro-nucleotide"
  modified_base 17..17: /mod_base="OTHER" /note="2'-OMe-nucleotide"
  modified_base 18..18: /mod_base="OTHER" /note="2'-OMe-nucleotide"
  modified_base 19..19: /mod_base="OTHER" /note="2'-OMe-nucleotide"
  misc_feature 19..20: /note="phosphorothioate bond"
  modified_base 20..20: /mod_base="OTHER" /note="2'-OMe-nucleotide"
  misc_feature 20..21: /note="phosphorothioate bond"
  modified_base 21..21: /mod_base="OTHER" /note="2'-OMe-nucleotide"
ucucuuaaggauuuaauacaa

SEQ ID NO: 1121 - DNA, 21 bp, Artificial Sequence
  Description of Artificial Sequence: Synthetic oligonucleotide
  Description of Combined DNA/RNA Molecule: Synthetic oligonucleotide
  N-term hydroxyl group
  C-term hydroxyl group
  modified_base 1..1: /mod_base="OTHER" /note="2'-fluoro-nucleotide"
  misc_feature 1..2: /note="phosphorothioate bond"
  modified_base 2..2: /mod_base="OTHER" /note="2'-fluoro-nucleotide"
  misc_feature 2..3: /note="phosphorothioate bond"
  modified_base 3..3: /mod_base="OTHER" /note="2'-OMe-nucleotide"
  modified_base 4..4: /mod_base="OTHER" /note="2'-fluoro-nucleotide"
  modified_base 5..5: /mod_base="OTHER" /note="2'-OMe-nucleotide"
  modified_base 6..6: /mod_base="OTHER" /note="2'-fluoro-nucleotide"
  modified_base 7..7: /mod_base="OTHER" /note="2'-OMe-nucleotide"
  modified_base 8..8: /mod_base="OTHER" /note="2'-fluoro-nucleotide"
  modified_base 9..9: /mod_base="OTHER" /note="2'-OMe-nucleotide"
  modified_base 10..10: /mod_base="OTHER" /note="2'-OMe-nucleotide"
  modified_base 11..11: /mod_base="OTHER" /note="2'-OMe-nucleotide"
  modified_base 12..12: /mod_base="OTHER" /note="2'-fluoro-nucleotide"
  modified_base 13..13: /mod_base="OTHER" /note="2'-OMe-nucleotide"
  modified_base 14..14: /mod_base="OTHER" /note="2'-fluoro-nucleotide"
  modified_base 15..15: /mod_base="OTHER" /note="2'-OMe-nucleotide"
  modified_base 16..16: /mod_base="OTHER" /note="2'-fluoro-nucleotide"
  modified_base 17..17: /mod_base="OTHER" /note="2'-OMe-nucleotide"
  modified_base 18..18: /mod_base="OTHER" /note="2'-fluoro-nucleotide"
  modified_base 19..19: /mod_base="OTHER" /note="2'-OMe-nucleotide"
  misc_feature 19..20: /note="phosphorothioate bond"
  modified_base 20..20: /mod_base="OTHER" /note="dT"
  misc_feature 20..21: /note="phosphorothioate bond"
  modified_base 21..21: /mod_base="OTHER" /note="dT"
ucucuuaaggauuuaauactt

SEQ ID NO: 1122 - RNA, 21 nt, Artificial Sequence
  Description of Artificial Sequence: Synthetic oligonucleotide
  N-term hydroxyl group
  C-term hydroxyl group
  modified_base 1..1: /mod_base="OTHER" /note="2'-OMe-nucleotide"
  misc_feature 1..2: /note="phosphorothioate bond"
  modified_base 2..2: /mod_base="OTHER" /note="2'-fluoro-nucleotide"
  misc_feature 2..3: /note="phosphorothioate bond"
  modified_base 3..3: /mod_base="OTHER" /note="2'-OMe-nucleotide"
  modified_base 4..4: /mod_base="OTHER" /note="2'-fluoro-nucleotide"
  modified_base 5..5: /mod_base="OTHER" /note="2'-OMe-nucleotide"
  modified_base 6..6: /mod_base="OTHER" /note="2'-OMe-nucleotide"
  modified_base 7..7: /mod_base="OTHER" /note="2'-OMe-nucleotide"
  modified_base 8..8: /mod_base="OTHER" /note="2'-OMe-nucleotide"
  modified_base 9..9: /mod_base="OTHER" /note="2'-OMe-nucleotide"
  modified_base 10..10: /mod_base="OTHER" /note="2'-OMe-nucleotide"
  modified_base 11..11: /mod_base="OTHER" /note="2'-OMe-nucleotide"
  modified_base 12..12: /mod_base="OTHER" /note="2'-OMe-nucleotide"
  modified_base 13..13: /mod_base="OTHER" /note="2'-OMe-nucleotide"
  modified_base 14..14: /mod_base="OTHER" /note="2'-fluoro-nucleotide"
  modified_base 15..15: /mod_base="OTHER" /note="2'-OMe-nucleotide"
  modified_base 16..16: /mod_base="OTHER" /note="2'-fluoro-nucleotide"
  modified_base 17..17: /mod_base="OTHER" /note="2'-OMe-nucleotide"
  modified_base 18..18: /mod_base="OTHER" /note="2'-OMe-nucleotide"
  modified_base 19..19: /mod_base="OTHER" /note="2'-OMe-nucleotide"
  misc_feature 19..20: /note="phosphorothioate bond"
  modified_base 20..20: /mod_base="OTHER" /note="2'-OMe-nucleotide"
  misc_feature 20..21: /note="phosphorothioate bond"
  modified_base 21..21: /mod_base="OTHER" /note="2'-OMe-nucleotide"
ucucuuaaggauuuaauacaa

SEQ ID NO: 1123 - RNA, 21 nt, Artificial Sequence
  Description of Artificial Sequence: Synthetic oligonucleotide
  N-term hydroxyl group
  C-term hydroxyl group
  modified_base 1..1: /mod_base="OTHER" /note="2'-OMe-nucleotide"
  misc_feature 1..2: /note="phosphorothioate bond"
  modified_base 2..2: /mod_base="OTHER" /note="2'-fluoro-nucleotide"
  misc_feature 2..3: /note="phosphorothioate bond"
  modified_base 3..3: /mod_base="OTHER" /note="2'-OMe-nucleotide"
  modified_base 4..4: /mod_base="OTHER" /note="2'-OMe-nucleotide"
  modified_base 5..5: /mod_base="OTHER" /note="2'-OMe-nucleotide"
  modified_base 6..6: /mod_base="OTHER" /note="2'-fluoro-nucleotide"
  modified_base 7..7: /mod_base="OTHER" /note="2'-OMe-nucleotide"
  modified_base 8..8: /mod_base="OTHER" /note="2'-OMe-nucleotide"
  modified_base 9..9: /mod_base="OTHER" /note="2'-OMe-nucleotide"
  modified_base 10..10: /mod_base="OTHER" /note="2'-OMe-nucleotide"
  modified_base 11..11: /mod_base="OTHER" /note="2'-OMe-nucleotide"
  modified_base 12..12: /mod_base="OTHER" /note="2'-OMe-nucleotide"
  modified_base 13..13: /mod_base="OTHER" /note="2'-OMe-nucleotide"
  modified_base 14..14: /mod_base="OTHER" /note="2'-fluoro-nucleotide"
  modified_base 15..15: /mod_base="OTHER" /note="2'-OMe-nucleotide"
  modified_base 16..16: /mod_base="OTHER" /note="2'-fluoro-nucleotide"
  modified_base 17..17: /mod_base="OTHER" /note="2'-OMe-nucleotide"
  modified_base 18..18: /mod_base="OTHER" /note="2'-OMe-nucleotide"
  modified_base 19..19: /mod_base="OTHER" /note="2'-OMe-nucleotide"
  misc_feature 19..20: /note="phosphorothioate bond"
  modified_base 20..20: /mod_base="OTHER" /note="2'-OMe-nucleotide"
  misc_feature 20..21: /note="phosphorothioate bond"
  modified_base 21..21: /mod_base="OTHER" /note="2'-OMe-nucleotide"
ucucuuaaggauuuaauacaa

SEQ ID NO: 1124 - RNA, 21 nt, Artificial Sequence
  Description of Artificial Sequence: Synthetic oligonucleotide
  N-term hydroxyl group
  C-term hydroxyl group
  modified_base 1..1: /mod_base="OTHER" /note="2'-OMe-nucleotide"
  misc_feature 1..2: /note="phosphorothioate bond"
  modified_base 2..2: /mod_base="OTHER" /note="2'-fluoro-nucleotide"
  misc_feature 2..3: /note="phosphorothioate bond"
  modified_base 3..3: /mod_base="OTHER" /note="2'-OMe-nucleotide"
  modified_base 4..4: /mod_base="OTHER" /note="2'-fluoro-nucleotide"
  modified_base 5..5: /mod_base="OTHER" /note="2'-OMe-nucleotide"
  modified_base 6..6: /mod_base="OTHER" /note="2'-OMe-nucleotide"
  modified_base 7..7: /mod_base="OTHER" /note="2'-OMe-nucleotide"
  modified_base 8..8: /mod_base="OTHER" /note="2'-fluoro-nucleotide"
  modified_base 9..9: /mod_base="OTHER" /note="2'-OMe-nucleotide"
  modified_base 10..10: /mod_base="OTHER" /note="2'-OMe-nucleotide"
  modified_base 11..11: /mod_base="OTHER" /note="2'-OMe-nucleotide"
  modified_base 12..12: /mod_base="OTHER" /note="2'-OMe-nucleotide"
  modified_base 13..13: /mod_base="OTHER" /note="2'-OMe-nucleotide"
  modified_base 14..14: /mod_base="OTHER" /note="2'-fluoro-nucleotide"
  modified_base 15..15: /mod_base="OTHER" /note="2'-OMe-nucleotide"
  modified_base 16..16: /mod_base="OTHER" /note="2'-fluoro-nucleotide"
  modified_base 17..17: /mod_base="OTHER" /note="2'-OMe-nucleotide"
  modified_base 18..18: /mod_base="OTHER" /note="2'-OMe-nucleotide"
  modified_base 19..19: /mod_base="OTHER" /note="2'-OMe-nucleotide"
  misc_feature 19..20: /note="phosphorothioate bond"
  modified_base 20..20: /mod_base="OTHER" /note="2'-OMe-nucleotide"
  misc_feature 20..21: /note="phosphorothioate bond"
  modified_base 21..21: /mod_base="OTHER" /note="2'-OMe-nucleotide"
ucucuuaaggauuuaauacaa

SEQ ID NO: 1125 - RNA, 21 nt, Artificial Sequence
  Description of Artificial Sequence: Synthetic oligonucleotide
  N-term hydroxyl group
  C-term hydroxyl group
  modified_base 1..1: /mod_base="OTHER" /note="2'-OMe-nucleotide"
  misc_feature 1..2: /note="phosphorothioate bond"
  modified_base 2..2: /mod_base="OTHER" /note="2'-fluoro-nucleotide"
  misc_feature 2..3: /note="phosphorothioate bond"
  modified_base 3..3: /mod_base="OTHER" /note="2'-OMe-nucleotide"
  modified_base 4..4: /mod_base="OTHER" /note="2'-OMe-nucleotide"
  modified_base 5..5: /mod_base="OTHER" /note="2'-OMe-nucleotide"
  modified_base 6..6: /mod_base="OTHER" /note="2'-OMe-nucleotide"
  modified_base 7..7: /mod_base="OTHER" /note="2'-OMe-nucleotide"
  modified_base 8..8: /mod_base="OTHER" /note="2'-fluoro-nucleotide"
  modified_base 9..9: /mod_base="OTHER" /note="2'-OMe-nucleotide"
  modified_base 10..10: /mod_base="OTHER" /note="2'-OMe-nucleotide"
  modified_base 11..11: /mod_base="OTHER" /note="2'-OMe-nucleotide"
  modified_base 12..12: /mod_base="OTHER" /note="2'-OMe-nucleotide"
  modified_base 13..13: /mod_base="OTHER" /note="2'-OMe-nucleotide"
  modified_base 14..14: /mod_base="OTHER" /note="2'-fluoro-nucleotide"
  modified_base 15..15: /mod_base="OTHER" /note="2'-OMe-nucleotide"
  modified_base 16..16: /mod_base="OTHER" /note="2'-fluoro-nucleotide"
  modified_base 17..17: /mod_base="OTHER" /note="2'-OMe-nucleotide"
  modified_base 18..18: /mod_base="OTHER" /note="2'-OMe-nucleotide"
  modified_base 19..19: /mod_base="OTHER" /note="2'-OMe-nucleotide"
  misc_feature 19..20: /note="phosphorothioate bond"
  modified_base 20..20: /mod_base="OTHER" /note="2'-OMe-nucleotide"
  misc_feature 20..21: /note="phosphorothioate bond"
  modified_base 21..21: /mod_base="OTHER" /note="2'-OMe-nucleotide"
ucucuuaaggauuuaauacaa

SEQ ID NO: 1126 - DNA, 21 bp, Artificial Sequence
  Description of Artificial Sequence: Synthetic oligonucleotide
  Description of Combined DNA/RNA Molecule: Synthetic oligonucleotide
  N-term hydroxyl group
  C-term hydroxyl group
  modified_base 1..1: /mod_base="OTHER" /note="2'-fluoro-nucleotide"
  misc_feature 1..2: /note="phosphorothioate bond"
  modified_base 2..2: /mod_base="OTHER" /note="2'-fluoro-nucleotide"
  misc_feature 2..3: /note="phosphorothioate bond"
  modified_base 3..3: /mod_base="OTHER" /note="2'-OMe-nucleotide"
  modified_base 4..4: /mod_base="OTHER" /note="2'-fluoro-nucleotide"
  modified_base 5..5: /mod_base="OTHER" /note="2'-OMe-nucleotide"
  modified_base 6..6: /mod_base="OTHER" /note="2'-fluoro-nucleotide"
  modified_base 7..7: /mod_base="OTHER" /note="2'-OMe-nucleotide"
  modified_base 8..8: /mod_base="OTHER" /note="2'-fluoro-nucleotide"
  modified_base 9..9: /mod_base="OTHER" /note="2'-OMe-nucleotide"
  modified_base 10..10: /mod_base="OTHER" /note="2'-OMe-nucleotide"
  modified_base 11..11: /mod_base="OTHER" /note="2'-OMe-nucleotide"
  modified_base 12..12: /mod_base="OTHER" /note="2'-fluoro-nucleotide"
  modified_base 13..13: /mod_base="OTHER" /note="2'-OMe-nucleotide"
  modified_base 14..14: /mod_base="OTHER" /note="2'-fluoro-nucleotide"
  modified_base 15..15: /mod_base="OTHER" /note="2'-OMe-nucleotide"
  modified_base 16..16: /mod_base="OTHER" /note="2'-fluoro-nucleotide"
  modified_base 17..17: /mod_base="OTHER" /note="2'-OMe-nucleotide"
  modified_base 18..18: /mod_base="OTHER" /note="2'-fluoro-nucleotide"
  modified_base 19..19: /mod_base="OTHER" /note="2'-OMe-nucleotide"
  misc_feature 19..20: /note="phosphorothioate bond"
  modified_base 20..20: /mod_base="OTHER" /note="dT"
  misc_feature 20..21: /note="phosphorothioate bond"
  modified_base 21..21: /mod_base="OTHER" /note="dT"
ucucuuaaggauuuaauactt

SEQ ID NO: 1127 - RNA, 21 nt, Artificial Sequence
  Description of Artificial Sequence: Synthetic oligonucleotide
  N-term hydroxyl group
  C-term hydroxyl group
  modified_base 1..1: /mod_base="OTHER" /note="2'-OMe-nucleotide"
  misc_feature 1..2: /note="phosphorothioate bond"
  modified_base 2..2: /mod_base="OTHER" /note="2'-fluoro-nucleotide"
  misc_feature 2..3: /note="phosphorothioate bond"
  modified_base 3..3: /mod_base="OTHER" /note="2'-OMe-nucleotide"
  modified_base 4..4: /mod_base="OTHER" /note="2'-fluoro-nucleotide"
  modified_base 5..5: /mod_base="OTHER" /note="2'-OMe-nucleotide"
  modified_base 6..6: /mod_base="OTHER" /note="2'-OMe-nucleotide"
  modified_base 7..7: /mod_base="OTHER" /note="2'-OMe-nucleotide"
  modified_base 8..8: /mod_base="OTHER" /note="2'-OMe-nucleotide"
  modified_base 9..9: /mod_base="OTHER" /note="2'-OMe-nucleotide"
  modified_base 10..10: /mod_base="OTHER" /note="2'-OMe-nucleotide"
  modified_base 11..11: /mod_base="OTHER" /note="2'-OMe-nucleotide"
  modified_base 12..12: /mod_base="OTHER" /note="2'-OMe-nucleotide"
  modified_base 13..13: /mod_base="OTHER" /note="2'-OMe-nucleotide"
  modified_base 14..14: /mod_base="OTHER" /note="2'-fluoro-nucleotide"
  modified_base 15..15: /mod_base="OTHER" /note="2'-OMe-nucleotide"
  modified_base 16..16: /mod_base="OTHER" /note="2'-fluoro-nucleotide"
  modified_base 17..17: /mod_base="OTHER" /note="2'-OMe-nucleotide"
  modified_base 18..18: /mod_base="OTHER" /note="2'-OMe-nucleotide"
  modified_base 19..19: /mod_base="OTHER" /note="2'-OMe-nucleotide"
  misc_feature 19..20: /note="phosphorothioate bond"
  modified_base 20..20: /mod_base="OTHER" /note="2'-OMe-nucleotide"
  misc_feature 20..21: /note="phosphorothioate bond"
  modified_base 21..21: /mod_base="OTHER" /note="2'-OMe-nucleotide"
augaauugucuugaucaauaa

SEQ ID NO: 1128 - RNA, 21 nt, Artificial Sequence
  Description of Artificial Sequence: Synthetic oligonucleotide
  N-term hydroxyl group
  C-term hydroxyl group
  modified_base 1..1: /mod_base="OTHER" /note="2'-OMe-nucleotide"
  misc_feature 1..2: /note="phosphorothioate bond"
  modified_base 2..2: /mod_base="OTHER" /note="2'-fluoro-nucleotide"
  misc_feature 2..3: /note="phosphorothioate bond"
  modified_base 3..3: /mod_base="OTHER" /note="2'-OMe-nucleotide"
  modified_base 4..4: /mod_base="OTHER" /note="2'-OMe-nucleotide"
  modified_base 5..5: /mod_base="OTHER" /note="2'-OMe-nucleotide"
  modified_base 6..6: /mod_base="OTHER" /note="2'-fluoro-nucleotide"
  modified_base 7..7: /mod_base="OTHER" /note="2'-OMe-nucleotide"
  modified_base 8..8: /mod_base="OTHER" /note="2'-OMe-nucleotide"
  modified_base 9..9: /mod_base="OTHER" /note="2'-OMe-nucleotide"
  modified_base 10..10: /mod_base="OTHER" /note="2'-OMe-nucleotide"
  modified_base 11..11: /mod_base="OTHER" /note="2'-OMe-nucleotide"
  modified_base 12..12: /mod_base="OTHER" /note="2'-OMe-nucleotide"
  modified_base 13..13: /mod_base="OTHER" /note="2'-OMe-nucleotide"
  modified_base 14..14: /mod_base="OTHER" /note="2'-fluoro-nucleotide"
  modified_base 15..15: /mod_base="OTHER" /note="2'-OMe-nucleotide"
  modified_base 16..16: /mod_base="OTHER" /note="2'-fluoro-nucleotide"
  modified_base 17..17: /mod_base="OTHER" /note="2'-OMe-nucleotide"
  modified_base 18..18: /mod_base="OTHER" /note="2'-OMe-nucleotide"
  modified_base 19..19: /mod_base="OTHER" /note="2'-OMe-nucleotide"
  misc_feature 19..20: /note="phosphorothioate bond"
  modified_base 20..20: /mod_base="OTHER" /note="2'-OMe-nucleotide"
  misc_feature 20..21: /note="phosphorothioate bond"
  modified_base 21..21: /mod_base="OTHER" /note="2'-OMe-nucleotide"
augaauugucuugaucaauaa

SEQ ID NO: 1129 - RNA, 21 nt, Artificial Sequence
  Description of Artificial Sequence: Synthetic oligonucleotide
  N-term hydroxyl group
  C-term hydroxyl group
  modified_base 1..1: /mod_base="OTHER" /note="2'-OMe-nucleotide"
  misc_feature 1..2: /note="phosphorothioate bond"
  modified_base 2..2: /mod_base="OTHER" /note="2'-fluoro-nucleotide"
  misc_feature 2..3: /note="phosphorothioate bond"
  modified_base 3..3: /mod_base="OTHER" /note="2'-OMe-nucleotide"
  modified_base 4..4: /mod_base="OTHER" /note="2'-fluoro-nucleotide"
  modified_base 5..5: /mod_base="OTHER" /note="2'-OMe-nucleotide"
  modified_base 6..6: /mod_base="OTHER" /note="2'-OMe-nucleotide"
  modified_base 7..7: /mod_base="OTHER" /note="2'-OMe-nucleotide"
  modified_base 8..8: /mod_base="OTHER" /note="2'-OMe-nucleotide"
  modified_base 9..9: /mod_base="OTHER" /note="2'-fluoro-nucleotide"
  modified_base 10..10: /mod_base="OTHER" /note="2'-OMe-nucleotide"
  modified_base 11..11: /mod_base="OTHER" /note="2'-OMe-nucleotide"
  modified_base 12..12: /mod_base="OTHER" /note="2'-OMe-nucleotide"
  modified_base 13..13: /mod_base="OTHER" /note="2'-OMe-nucleotide"
  modified_base 14..14: /mod_base="OTHER" /note="2'-fluoro-nucleotide"
  modified_base 15..15: /mod_base="OTHER" /note="2'-OMe-nucleotide"
  modified_base 16..16: /mod_base="OTHER" /note="2'-fluoro-nucleotide"
  modified_base 17..17: /mod_base="OTHER" /note="2'-OMe-nucleotide"
  modified_base 18..18: /mod_base="OTHER" /note="2'-OMe-nucleotide"
  modified_base 19..19: /mod_base="OTHER" /note="2'-OMe-nucleotide"
  misc_feature 19..20: /note="phosphorothioate bond"
  modified_base 20..20: /mod_base="OTHER" /note="2'-OMe-nucleotide"
  misc_feature 20..21: /note="phosphorothioate bond"
  modified_base 21..21: /mod_base="OTHER" /note="2'-OMe-nucleotide"
augaauugucuugaucaauaa

SEQ ID NO: 1130 - DNA, 21 bp, Artificial Sequence
  Description of Artificial Sequence: Synthetic oligonucleotide
  Description of Combined DNA/RNA Molecule: Synthetic oligonucleotide
  N-term hydroxyl group
  C-term hydroxyl group
  modified_base 1..1: /mod_base="OTHER" /note="2'-fluoro-nucleotide"
  misc_feature 1..2: /note="phosphorothioate bond"
  modified_base 2..2: /mod_base="OTHER" /note="2'-fluoro-nucleotide"
  misc_feature 2..3: /note="phosphorothioate bond"
  modified_base 3..3: /mod_base="OTHER" /note="2'-OMe-nucleotide"
  modified_base 4..4: /mod_base="OTHER" /note="2'-fluoro-nucleotide"
  modified_base 5..5: /mod_base="OTHER" /note="2'-OMe-nucleotide"
  modified_base 6..6: /mod_base="OTHER" /note="2'-fluoro-nucleotide"
  modified_base 7..7: /mod_base="OTHER" /note="2'-OMe-nucleotide"
  modified_base 8..8: /mod_base="OTHER" /note="2'-fluoro-nucleotide"
  modified_base 9..9: /mod_base="OTHER" /note="2'-OMe-nucleotide"
  modified_base 10..10: /mod_base="OTHER" /note="2'-fluoro-nucleotide"
  modified_base 11..11: /mod_base="OTHER" /note="2'-OMe-nucleotide"
  modified_base 12..12: /mod_base="OTHER" /note="2'-OMe-nucleotide"
  modified_base 13..13: /mod_base="OTHER" /note="2'-OMe-nucleotide"
  modified_base 14..14: /mod_base="OTHER" /note="2'-fluoro-nucleotide"
  modified_base 15..15: /mod_base="OTHER" /note="2'-OMe-nucleotide"
  modified_base 16..16: /mod_base="OTHER" /note="2'-fluoro-nucleotide"
  modified_base 17..17: /mod_base="OTHER" /note="2'-OMe-nucleotide"
  modified_base 18..18: /mod_base="OTHER" /note="2'-fluoro-nucleotide"
  modified_base 19..19: /mod_base="OTHER" /note="2'-OMe-nucleotide"
  misc_feature 19..20: /note="phosphorothioate bond"
  modified_base 20..20: /mod_base="OTHER" /note="dT"
  misc_feature 20..21: /note="phosphorothioate bond"
  modified_base 21..21: /mod_base="OTHER" /note="dT"
augaauugucuugaucaautt

SEQ ID NO: 1131 - RNA, 21 nt, Artificial Sequence
  Description of Artificial Sequence: Synthetic oligonucleotide
  N-term hydroxyl group
  C-term hydroxyl group
  modified_base 1..1: /mod_base="OTHER" /note="2'-OMe-nucleotide"
  misc_feature 1..2: /note="phosphorothioate bond"
  modified_base 2..2: /mod_base="OTHER" /note="2'-fluoro-nucleotide"
  misc_feature 2..3: /note="phosphorothioate bond"
  modified_base 3..3: /mod_base="OTHER" /note="2'-OMe-nucleotide"
  modified_base 4..4: /mod_base="OTHER" /note="2'-fluoro-nucleotide"
  modified_base 5..5: /mod_base="OTHER" /note="2'-OMe-nucleotide"
  modified_base 6..6: /mod_base="OTHER" /note="2'-OMe-nucleotide"
  modified_base 7..7: /mod_base="OTHER" /note="2'-OMe-nucleotide"
  modified_base 8..8: /mod_base="OTHER" /note="2'-OMe-nucleotide"
  modified_base 9..9: /mod_base="OTHER" /note="2'-OMe-nucleotide"
  modified_base 10..10: /mod_base="OTHER" /note="2'-OMe-nucleotide"
  modified_base 11..11: /mod_base="OTHER" /note="2'-OMe-nucleotide"
  modified_base 12..12: /mod_base="OTHER" /note="2'-OMe-nucleotide"
  modified_base 13..13: /mod_base="OTHER" /note="2'-OMe-nucleotide"
  modified_base 14..14: /mod_base="OTHER" /note="2'-fluoro-nucleotide"
  modified_base 15..15: /mod_base="OTHER" /note="2'-OMe-nucleotide"
  modified_base 16..16: /mod_base="OTHER" /note="2'-fluoro-nucleotide"
  modified_base 17..17: /mod_base="OTHER" /note="2'-OMe-nucleotide"
  modified_base 18..18: /mod_base="OTHER" /note="2'-OMe-nucleotide"
  modified_base 19..19: /mod_base="OTHER" /note="2'-OMe-nucleotide"
  misc_feature 19..20: /note="phosphorothioate bond"
  modified_base 20..20: /mod_base="OTHER" /note="2'-OMe-nucleotide"
  misc_feature 20..21: /note="phosphorothioate bond"
  modified_base 21..21: /mod_base="OTHER" /note="2'-OMe-nucleotide"
augaauugucuugaucaauaa

SEQ ID NO: 1132 - RNA, 21 nt, Artificial Sequence
  Description of Artificial Sequence: Synthetic oligonucleotide
  N-term hydroxyl group
  C-term hydroxyl group
  modified_base 1..1: /mod_base="OTHER" /note="2'-OMe-nucleotide"
  misc_feature 1..2: /note="phosphorothioate bond"
  modified_base 2..2: /mod_base="OTHER" /note="2'-fluoro-nucleotide"
  misc_feature 2..3: /note="phosphorothioate bond"
  modified_base 3..3: /mod_base="OTHER" /note="2'-OMe-nucleotide"
  modified_base 4..4: /mod_base="OTHER" /note="2'-OMe-nucleotide"
  modified_base 5..5: /mod_base="OTHER" /note="2'-OMe-nucleotide"
  modified_base 6..6: /mod_base="OTHER" /note="2'-fluoro-nucleotide"
  modified_base 7..7: /mod_base="OTHER" /note="2'-OMe-nucleotide"
  modified_base 8..8: /mod_base="OTHER" /note="2'-OMe-nucleotide"
  modified_base 9..9: /mod_base="OTHER" /note="2'-OMe-nucleotide"
  modified_base 10..10: /mod_base="OTHER" /note="2'-OMe-nucleotide"
  modified_base 11..11: /mod_base="OTHER" /note="2'-OMe-nucleotide"
  modified_base 12..12: /mod_base="OTHER" /note="2'-OMe-nucleotide"
  modified_base 13..13: /mod_base="OTHER" /note="2'-OMe-nucleotide"
  modified_base 14..14: /mod_base="OTHER" /note="2'-fluoro-nucleotide"
  modified_base 15..15: /mod_base="OTHER" /note="2'-OMe-nucleotide"
  modified_base 16..16: /mod_base="OTHER" /note="2'-fluoro-nucleotide"
  modified_base 17..17: /mod_base="OTHER" /note="2'-OMe-nucleotide"
  modified_base 18..18: /mod_base="OTHER" /note="2'-OMe-nucleotide"
  modified_base 19..19: /mod_base="OTHER" /note="2'-OMe-nucleotide"
  misc_feature 19..20: /note="phosphorothioate bond"
  modified_base 20..20: /mod_base="OTHER" /note="2'-OMe-nucleotide"
  misc_feature 20..21: /note="phosphorothioate bond"
  modified_base 21..21: /mod_base="OTHER" /note="2'-OMe-nucleotide"
augaauugucuugaucaauaa

SEQ ID NO: 1133 - RNA, 21 nt, Artificial Sequence
  Description of Artificial Sequence: Synthetic oligonucleotide
  N-term hydroxyl group
  C-term hydroxyl group
  modified_base 1..1: /mod_base="OTHER" /note="2'-OMe-nucleotide"
  misc_feature 1..2: /note="phosphorothioate bond"
  modified_base 2..2: /mod_base="OTHER" /note="2'-fluoro-nucleotide"
  misc_feature 2..3: /note="phosphorothioate bond"
  modified_base 3..3: /mod_base="OTHER" /note="2'-OMe-nucleotide"
  modified_base 4..4: /mod_base="OTHER" /note="2'-fluoro-nucleotide"
  modified_base 5..5: /mod_base="OTHER" /note="2'-OMe-nucleotide"
  modified_base 6..6: /mod_base="OTHER" /note="2'-OMe-nucleotide"
  modified_base 7..7: /mod_base="OTHER" /note="2'-OMe-nucleotide"
  modified_base 8..8: /mod_base="OTHER" /note="2'-OMe-nucleotide"
  modified_base 9..9: /mod_base="OTHER" /note="2'-fluoro-nucleotide"
  modified_base 10..10: /mod_base="OTHER" /note="2'-OMe-nucleotide"
  modified_base 11..11: /mod_base="OTHER" /note="2'-OMe-nucleotide"
  modified_base 12..12: /mod_base="OTHER" /note="2'-OMe-nucleotide"
  modified_base 13..13: /mod_base="OTHER" /note="2'-OMe-nucleotide"
  modified_base 14..14: /mod_base="OTHER" /note="2'-fluoro-nucleotide"
  modified_base 15..15: /mod_base="OTHER" /note="2'-OMe-nucleotide"
  modified_base 16..16: /mod_base="OTHER" /note="2'-fluoro-nucleotide"
  modified_base 17..17: /mod_base="OTHER" /note="2'-OMe-nucleotide"
  modified_base 18..18: /mod_base="OTHER" /note="2'-OMe-nucleotide"
  modified_base 19..19: /mod_base="OTHER" /note="2'-OMe-nucleotide"
  misc_feature 19..20: /note="phosphorothioate bond"
  modified_base 20..20: /mod_base="OTHER" /note="2'-OMe-nucleotide"
  misc_feature 20..21: /note="phosphorothioate bond"
  modified_base 21..21: /mod_base="OTHER" /note="2'-OMe-nucleotide"
augaauugucuugaucaauaa

SEQ ID NO: 1134 - DNA, 21 bp, Artificial Sequence
  Description of Artificial Sequence: Synthetic oligonucleotide
  Description of Combined DNA/RNA Molecule: Synthetic oligonucleotide
  N-term hydroxyl group
  C-term hydroxyl group
  modified_base 1..1: /mod_base="OTHER" /note="2'-fluoro-nucleotide"
  misc_feature 1..2: /note="phosphorothioate bond"
  modified_base 2..2: /mod_base="OTHER" /note="2'-fluoro-nucleotide"
  misc_feature 2..3: /note="phosphorothioate bond"
  modified_base 3..3: /mod_base="OTHER" /note="2'-OMe-nucleotide"
  modified_base 4..4: /mod_base="OTHER" /note="2'-fluoro-nucleotide"
  modified_base 5..5: /mod_base="OTHER" /note="2'-OMe-nucleotide"
  modified_base 6..6: /mod_base="OTHER" /note="2'-fluoro-nucleotide"
  modified_base 7..7: /mod_base="OTHER" /note="2'-OMe-nucleotide"
  modified_base 8..8: /mod_base="OTHER" /note="2'-fluoro-nucleotide"
  modified_base 9..9: /mod_base="OTHER" /note="2'-OMe-nucleotide"
  modified_base 10..10: /mod_base="OTHER" /note="2'-fluoro-nucleotide"
  modified_base 11..11: /mod_base="OTHER" /note="2'-OMe-nucleotide"
  modified_base 12..12: /mod_base="OTHER" /note="2'-OMe-nucleotide"
  modified_base 13..13: /mod_base="OTHER" /note="2'-OMe-nucleotide"
  modified_base 14..14: /mod_base="OTHER" /note="2'-fluoro-nucleotide"
  modified_base 15..15: /mod_base="OTHER" /note="2'-OMe-nucleotide"
  modified_base 16..16: /mod_base="OTHER" /note="2'-fluoro-nucleotide"
  modified_base 17..17: /mod_base="OTHER" /note="2'-OMe-nucleotide"
  modified_base 18..18: /mod_base="OTHER" /note="2'-fluoro-nucleotide"
  modified_base 19..19: /mod_base="OTHER" /note="2'-OMe-nucleotide"
  misc_feature 19..20: /note="phosphorothioate bond"
  modified_base 20..20: /mod_base="OTHER" /note="dT"
  misc_feature 20..21: /note="phosphorothioate bond"
  modified_base 21..21: /mod_base="OTHER" /note="dT"
augaauugucuugaucaautt

SEQ ID NO: 1135 - RNA, 21 nt, Artificial Sequence
  Description of Artificial Sequence: Synthetic oligonucleotide
  N-term hydroxyl group
  C-term hydroxyl group
  modified_base 1..1: /mod_base="OTHER" /note="2'-OMe-nucleotide"
  misc_feature 1..2: /note="phosphorothioate bond"
  modified_base 2..2: /mod_base="OTHER" /note="2'-fluoro-nucleotide"
  misc_feature 2..3: /note="phosphorothioate bond"
  modified_base 3..3: /mod_base="OTHER" /note="2'-OMe-nucleotide"
  modified_base 4..4: /mod_base="OTHER" /note="2'-fluoro-nucleotide"
  modified_base 5..5: /mod_base="OTHER" /note="2'-OMe-nucleotide"
  modified_base 6..6: /mod_base="OTHER" /note="2'-OMe-nucleotide"
  modified_base 7..7: /mod_base="OTHER" /note="2'-OMe-nucleotide"
  modified_base 8..8: /mod_base="OTHER" /note="2'-OMe-nucleotide"
  modified_base 9..9: /mod_base="OTHER" /note="2'-OMe-nucleotide"
  modified_base 10..10: /mod_base="OTHER" /note="2'-OMe-nucleotide"
  modified_base 11..11: /mod_base="OTHER" /note="2'-OMe-nucleotide"
  modified_base 12..12: /mod_base="OTHER" /note="2'-OMe-nucleotide"
  modified_base 13..13: /mod_base="OTHER" /note="2'-OMe-nucleotide"
  modified_base 14..14: /mod_base="OTHER" /note="2'-fluoro-nucleotide"
  modified_base 15..15: /mod_base="OTHER" /note="2'-OMe-nucleotide"
  modified_base 16..16: /mod_base="OTHER" /note="2'-fluoro-nucleotide"
  modified_base 17..17: /mod_base="OTHER" /note="2'-OMe-nucleotide"
  modified_base 18..18: /mod_base="OTHER" /note="2'-OMe-nucleotide"
  modified_base 19..19: /mod_base="OTHER" /note="2'-OMe-nucleotide"
  misc_feature 19..20: /note="phosphorothioate bond"
  modified_base 20..20: /mod_base="OTHER" /note="2'-OMe-nucleotide"
  misc_feature 20..21: /note="phosphorothioate bond"
  modified_base 21..21: /mod_base="OTHER" /note="2'-OMe-nucleotide"
augaauugucuugaucaauaa

SEQ ID NO: 1136 - RNA, 21 nt, Artificial Sequence
  Description of Artificial Sequence: Synthetic oligonucleotide
  N-term hydroxyl group
  C-term hydroxyl group
  modified_base 1..1: /mod_base="OTHER" /note="2'-OMe-nucleotide"
  misc_feature 1..2: /note="phosphorothioate bond"
  modified_base 2..2: /mod_base="OTHER" /note="2'-fluoro-nucleotide"
  misc_feature 2..3: /note="phosphorothioate bond"
  modified_base 3..3: /mod_base="OTHER" /note="2'-OMe-nucleotide"
  modified_base 4..4: /mod_base="OTHER" /note="2'-OMe-nucleotide"
  modified_base 5..5: /mod_base="OTHER" /note="2'-OMe-nucleotide"
  modified_base 6..6: /mod_base="OTHER" /note="2'-fluoro-nucleotide"
  modified_base 7..7: /mod_base="OTHER" /note="2'-OMe-nucleotide"
  modified_base 8..8: /mod_base="OTHER" /note="2'-OMe-nucleotide"
  modified_base 9..9: /mod_base="OTHER" /note="2'-OMe-nucleotide"
  modified_base 10..10: /mod_base="OTHER" /note="2'-OMe-nucleotide"
  modified_base 11..11: /mod_base="OTHER" /note="2'-OMe-nucleotide"
  modified_base 12..12: /mod_base="OTHER" /note="2'-OMe-nucleotide"
  modified_base 13..13: /mod_base="OTHER" /note="2'-OMe-nucleotide"
  modified_base 14..14: /mod_base="OTHER" /note="2'-fluoro-nucleotide"
  modified_base 15..15: /mod_base="OTHER" /note="2'-OMe-nucleotide"
  modified_base 16..16: /mod_base="OTHER" /note="2'-fluoro-nucleotide"
  modified_base 17..17: /mod_base="OTHER" /note="2'-OMe-nucleotide"
  modified_base 18..18: /mod_base="OTHER" /note="2'-OMe-nucleotide"
  modified_base 19..19: /mod_base="OTHER" /note="2'-OMe-nucleotide"
  misc_feature 19..20: /note="phosphorothioate bond"
  modified_base 20..20: /mod_base="OTHER" /note="2'-OMe-nucleotide"
  misc_feature 20..21: /note="phosphorothioate bond"
  modified_base 21..21: /mod_base="OTHER" /note="2'-OMe-nucleotide"
augaauugucuugaucaauaa

SEQ ID NO: 1137 - RNA, 21 nt, Artificial Sequence
  Description of Artificial Sequence: Synthetic oligonucleotide
  N-term hydroxyl group
  C-term hydroxyl group
  modified_base 1..1: /mod_base="OTHER" /note="2'-OMe-nucleotide"
  misc_feature 1..2: /note="phosphorothioate bond"
  modified_base 2..2: /mod_base="OTHER" /note="2'-fluoro-nucleotide"
  misc_feature 2..3: /note="phosphorothioate bond"
  modified_base 3..3: /mod_base="OTHER" /note="2'-OMe-nucleotide"
  modified_base 4..4: /mod_base="OTHER" /note="2'-fluoro-nucleotide"
  modified_base 5..5: /mod_base="OTHER" /note="2'-OMe-nucleotide"
  modified_base 6..6: /mod_base="OTHER" /note="2'-OMe-nucleotide"
  modified_base 7..7: /mod_base="OTHER" /note="2'-OMe-nucleotide"
  modified_base 8..8: /mod_base="OTHER" /note="2'-fluoro-nucleotide"
  modified_base 9..9: /mod_base="OTHER" /note="2'-OMe-nucleotide"
  modified_base 10..10: /mod_base="OTHER" /note="2'-OMe-nucleotide"
  modified_base 11..11: /mod_base="OTHER" /note="2'-OMe-nucleotide"
  modified_base 12..12: /mod_base="OTHER" /note="2'-OMe-nucleotide"
  modified_base 13..13: /mod_base="OTHER" /note="2'-OMe-nucleotide"
  modified_base 14..14: /mod_base="OTHER" /note="2'-fluoro-nucleotide"
  modified_base 15..15: /mod_base="OTHER" /note="2'-OMe-nucleotide"
  modified_base 16..16: /mod_base="OTHER" /note="2'-fluoro-nucleotide"
  modified_base 17..17: /mod_base="OTHER" /note="2'-OMe-nucleotide"
  modified_base 18..18: /mod_base="OTHER" /note="2'-OMe-nucleotide"
  modified_base 19..19: /mod_base="OTHER" /note="2'-OMe-nucleotide"
  misc_feature 19..20: /note="phosphorothioate bond"
  modified_base 20..20: /mod_base="OTHER" /note="2'-OMe-nucleotide"
  misc_feature 20..21: /note="phosphorothioate bond"
  modified_base 21..21: /mod_base="OTHER" /note="2'-OMe-nucleotide"
augaauugucuugaucaauaa

SEQ ID NO: 1138 - RNA, 21 nt, Artificial Sequence
  Description of Artificial Sequence: Synthetic oligonucleotide
  N-term hydroxyl group
  C-term hydroxyl group
  modified_base 1..1: /mod_base="OTHER" /note="2'-OMe-nucleotide"
  misc_feature 1..2: /note="phosphorothioate bond"
  modified_base 2..2: /mod_base="OTHER" /note="2'-fluoro-nucleotide"
  misc_feature 2..3: /note="phosphorothioate bond"
  modified_base 3..3: /mod_base="OTHER" /note="2'-OMe-nucleotide"
  modified_base 4..4: /mod_base="OTHER" /note="2'-OMe-nucleotide"
  modified_base 5..5: /mod_base="OTHER" /note="2'-OMe-nucleotide"
  modified_base 6..6: /mod_base="OTHER" /note="2'-OMe-nucleotide"
  modified_base 7..7: /mod_base="OTHER" /note="2'-OMe-nucleotide"
  modified_base 8..8: /mod_base="OTHER" /note="2'-fluoro-nucleotide"
  modified_base 9..9: /mod_base="OTHER" /note="2'-OMe-nucleotide"
  modified_base 10..10: /mod_base="OTHER" /note="2'-OMe-nucleotide"
  modified_base 11..11: /mod_base="OTHER" /note="2'-OMe-nucleotide"
  modified_base 12..12: /mod_base="OTHER" /note="2'-OMe-nucleotide"
  modified_base 13..13: /mod_base="OTHER" /note="2'-OMe-nucleotide"
  modified_base 14..14: /mod_base="OTHER" /note="2'-fluoro-nucleotide"
  modified_base 15..15: /mod_base="OTHER" /note="2'-OMe-nucleotide"
  modified_base 16..16: /mod_base="OTHER" /note="2'-fluoro-nucleotide"
  modified_base 17..17: /mod_base="OTHER" /note="2'-OMe-nucleotide"
  modified_base 18..18: /mod_base="OTHER" /note="2'-OMe-nucleotide"
  modified_base 19..19: /mod_base="OTHER" /note="2'-OMe-nucleotide"
  misc_feature 19..20: /note="phosphorothioate bond"
  modified_base 20..20: /mod_base="OTHER" /note="2'-OMe-nucleotide"
  misc_feature 20..21: /note="phosphorothioate bond"
  modified_base 21..21: /mod_base="OTHER" /note="2'-OMe-nucleotide"
augaauugucuugaucaauaa

SEQ ID NO: 1139 - DNA, 21 bp, Artificial Sequence
  Description of Artificial Sequence: Synthetic oligonucleotide
  Description of Combined DNA/RNA Molecule: Synthetic oligonucleotide
  N-term hydroxyl group
  C-term hydroxyl group
  modified_base 1..1: /mod_base="OTHER" /note="2'-fluoro-nucleotide"
  misc_feature 1..2: /note="phosphorothioate bond"
  modified_base 2..2: /mod_base="OTHER" /note="2'-fluoro-nucleotide"
  misc_feature 2..3: /note="phosphorothioate bond"
  modified_base 3..3: /mod_base="OTHER" /note="2'-OMe-nucleotide"
  modified_base 4..4: /mod_base="OTHER" /note="2'-fluoro-nucleotide"
  modified_base 5..5: /mod_base="OTHER" /note="2'-OMe-nucleotide"
  modified_base 6..6: /mod_base="OTHER" /note="2'-fluoro-nucleotide"
  modified_base 7..7: /mod_base="OTHER" /note="2'-OMe-nucleotide"
  modified_base 8..8: /mod_base="OTHER" /note="2'-fluoro-nucleotide"
  modified_base 9..9: /mod_base="OTHER" /note="2'-OMe-nucleotide"
  modified_base 10..10: /mod_base="OTHER" /note="2'-OMe-nucleotide"
  modified_base 11..11: /mod_base="OTHER" /note="2'-OMe-nucleotide"
  modified_base 12..12: /mod_base="OTHER" /note="2'-fluoro-nucleotide"
  modified_base 13..13: /mod_base="OTHER" /note="2'-OMe-nucleotide"
  modified_base 14..14: /mod_base="OTHER" /note="2'-fluoro-nucleotide"
  modified_base 15..15: /mod_base="OTHER" /note="2'-OMe-nucleotide"
  modified_base 16..16: /mod_base="OTHER" /note="2'-fluoro-nucleotide"
  modified_base 17..17: /mod_base="OTHER" /note="2'-OMe-nucleotide"
  modified_base 18..18: /mod_base="OTHER" /note="2'-fluoro-nucleotide"
  modified_base 19..19: /mod_base="OTHER" /note="2'-OMe-nucleotide"
  misc_feature 19..20: /note="phosphorothioate bond"
  modified_base 20..20: /mod_base="OTHER" /note="dT"
  misc_feature 20..21: /note="phosphorothioate bond"
  modified_base 21..21: /mod_base="OTHER" /note="dT"
augaauugucuugaucaautt

SEQ ID NO: 1140 - RNA, 21 nt, Artificial Sequence
  Description of Artificial Sequence: Synthetic oligonucleotide
  N-term hydroxyl group
  C-term hydroxyl group
  modified_base 1..1: /mod_base="OTHER" /note="2'-OMe-nucleotide"
  misc_feature 1..2: /note="phosphorothioate bond"
  modified_base 2..2: /mod_base="OTHER" /note="2'-fluoro-nucleotide"
  misc_feature 2..3: /note="phosphorothioate bond"
  modified_base 3..3: /mod_base="OTHER" /note="2'-OMe-nucleotide"
  modified_base 4..4: /mod_base="OTHER" /note="2'-fluoro-nucleotide"
  modified_base 5..5: /mod_base="OTHER" /note="2'-OMe-nucleotide"
  modified_base 6..6: /mod_base="OTHER" /note="2'-OMe-nucleotide"
  modified_base 7..7: /mod_base="OTHER" /note="2'-OMe-nucleotide"
  modified_base 8..8: /mod_base="OTHER" /note="2'-OMe-nucleotide"
  modified_base 9..9: /mod_base="OTHER" /note="2'-OMe-nucleotide"
  modified_base 10..10: /mod_base="OTHER" /note="2'-OMe-nucleotide"
  modified_base 11..11: /mod_base="OTHER" /note="2'-OMe-nucleotide"
  modified_base 12..12: /mod_base="OTHER" /note="2'-OMe-nucleotide"
  modified_base 13..13: /mod_base="OTHER" /note="2'-OMe-nucleotide"
  modified_base 14..14: /mod_base="OTHER" /note="2'-fluoro-nucleotide"
  modified_base 15..15: /mod_base="OTHER" /note="2'-OMe-nucleotide"
  modified_base 16..16: /mod_base="OTHER" /note="2'-fluoro-nucleotide"
  modified_base 17..17: /mod_base="OTHER" /note="2'-OMe-nucleotide"
  modified_base 18..18: /mod_base="OTHER" /note="2'-OMe-nucleotide"
  modified_base 19..19: /mod_base="OTHER" /note="2'-OMe-nucleotide"
  misc_feature 19..20: /note="phosphorothioate bond"
  modified_base 20..20: /mod_base="OTHER" /note="2'-OMe-nucleotide"
  misc_feature 20..21: /note="phosphorothioate bond"
  modified_base 21..21: /mod_base="OTHER" /note="2'-OMe-nucleotide"
augaauugucuugaucaauaa

SEQ ID NO: 1141 - RNA, 21 nt, Artificial Sequence
  Description of Artificial Sequence: Synthetic oligonucleotide
  N-term hydroxyl group
  C-term hydroxyl group
  modified_base 1..1: /mod_base="OTHER" /note="2'-OMe-nucleotide"
  misc_feature 1..2: /note="phosphorothioate bond"
  modified_base 2..2: /mod_base="OTHER" /note="2'-fluoro-nucleotide"
  misc_feature 2..3: /note="phosphorothioate bond"
  modified_base 3..3: /mod_base="OTHER" /note="2'-OMe-nucleotide"
  modified_base 4..4: /mod_base="OTHER" /note="2'-OMe-nucleotide"
  modified_base 5..5: /mod_base="OTHER" /note="2'-OMe-nucleotide"
  modified_base 6..6: /mod_base="OTHER" /note="2'-fluoro-nucleotide"
  modified_base 7..7: /mod_base="OTHER" /note="2'-OMe-nucleotide"
  modified_base 8..8: /mod_base="OTHER" /note="2'-OMe-nucleotide"
  modified_base 9..9: /mod_base="OTHER" /note="2'-OMe-nucleotide"
  modified_base 10..10: /mod_base="OTHER" /note="2'-OMe-nucleotide"
  modified_base 11..11: /mod_base="OTHER" /note="2'-OMe-nucleotide"
  modified_base 12..12: /mod_base="OTHER" /note="2'-OMe-nucleotide"
  modified_base 13..13: /mod_base="OTHER" /note="2'-OMe-nucleotide"
  modified_base 14..14: /mod_base="OTHER" /note="2'-fluoro-nucleotide"
  modified_base 15..15: /mod_base="OTHER" /note="2'-OMe-nucleotide"
  modified_base 16..16: /mod_base="OTHER" /note="2'-fluoro-nucleotide"
  modified_base 17..17: /mod_base="OTHER" /note="2'-OMe-nucleotide"
  modified_base 18..18: /mod_base="OTHER" /note="2'-OMe-nucleotide"
  modified_base 19..19: /mod_base="OTHER" /note="2'-OMe-nucleotide"
  misc_feature 19..20: /note="phosphorothioate bond"
  modified_base 20..20: /mod_base="OTHER" /note="2'-OMe-nucleotide"
  misc_feature 20..21: /note="phosphorothioate bond"
  modified_base 21..21: /mod_base="OTHER" /note="2'-OMe-nucleotide"
augaauugucuugaucaauaa

SEQ ID NO: 1142 - RNA, 21 nt, Artificial Sequence
  Description of Artificial Sequence: Synthetic oligonucleotide
  N-term hydroxyl group
  C-term hydroxyl group
  modified_base 1..1: /mod_base="OTHER" /note="2'-OMe-nucleotide"
  misc_feature 1..2: /note="phosphorothioate bond"
  modified_base 2..2: /mod_base="OTHER" /note="2'-fluoro-nucleotide"
  misc_feature 2..3: /note="phosphorothioate bond"
  modified_base 3..3: /mod_base="OTHER" /note="2'-OMe-nucleotide"
  modified_base 4..4: /mod_base="OTHER" /note="2'-fluoro-nucleotide"
  modified_base 5..5: /mod_base="OTHER" /note="2'-OMe-nucleotide"
  modified_base 6..6: /mod_base="OTHER" /note="2'-OMe-nucleotide"
  modified_base 7..7: /mod_base="OTHER" /note="2'-OMe-nucleotide"
  modified_base 8..8: /mod_base="OTHER" /note="2'-fluoro-nucleotide"
  modified_base 9..9: /mod_base="OTHER" /note="2'-OMe-nucleotide"
  modified_base 10..10: /mod_base="OTHER" /note="2'-OMe-nucleotide"
  modified_base 11..11: /mod_base="OTHER" /note="2'-OMe-nucleotide"
  modified_base 12..12: /mod_base="OTHER" /note="2'-OMe-nucleotide"
  modified_base 13..13: /mod_base="OTHER" /note="2'-OMe-nucleotide"
  modified_base 14..14: /mod_base="OTHER" /note="2'-fluoro-nucleotide"
  modified_base 15..15: /mod_base="OTHER" /note="2'-OMe-nucleotide"
  modified_base 16..16: /mod_base="OTHER" /note="2'-fluoro-nucleotide"
  modified_base 17..17: /mod_base="OTHER" /note="2'-OMe-nucleotide"
  modified_base 18..18: /mod_base="OTHER" /note="2'-OMe-nucleotide"
  modified_base 19..19: /mod_base="OTHER" /note="2'-OMe-nucleotide"
  misc_feature 19..20: /note="phosphorothioate bond"
  modified_base 20..20: /mod_base="OTHER" /note="2'-OMe-nucleotide"
  misc_feature 20..21: /note="phosphorothioate bond"
  modified_base 21..21: /mod_base="OTHER" /note="2'-OMe-nucleotide"
augaauugucuugaucaauaa

SEQ ID NO: 1143 - RNA, 21 nt, Artificial Sequence
  Description of Artificial Sequence: Synthetic oligonucleotide
  N-term hydroxyl group
  C-term hydroxyl group
  modified_base 1..1: /mod_base="OTHER" /note="2'-OMe-nucleotide"
  misc_feature 1..2: /note="phosphorothioate bond"
  modified_base 2..2: /mod_base="OTHER" /note="2'-fluoro-nucleotide"
  misc_feature 2..3: /note="phosphorothioate bond"
  modified_base 3..3: /mod_base="OTHER" /note="2'-OMe-nucleotide"
  modified_base 4..4: /mod_base="OTHER" /note="2'-OMe-nucleotide"
  modified_base 5..5: /mod_base="OTHER" /note="2'-OMe-nucleotide"
  modified_base 6..6: /mod_base="OTHER" /note="2'-OMe-nucleotide"
  modified_base 7..7: /mod_base="OTHER" /note="2'-OMe-nucleotide"
  modified_base 8..8: /mod_base="OTHER" /note="2'-fluoro-nucleotide"
  modified_base 9..9: /mod_base="OTHER" /note="2'-OMe-nucleotide"
  modified_base 10..10: /mod_base="OTHER" /note="2'-OMe-nucleotide"
  modified_base 11..11: /mod_base="OTHER" /note="2'-OMe-nucleotide"
  modified_base 12..12: /mod_base="OTHER" /note="2'-OMe-nucleotide"
  modified_base 13..13: /mod_base="OTHER" /note="2'-OMe-nucleotide"
  modified_base 14..14: /mod_base="OTHER" /note="2'-fluoro-nucleotide"
  modified_base 15..15: /mod_base="OTHER" /note="2'-OMe-nucleotide"
  modified_base 16..16: /mod_base="OTHER" /note="2'-fluoro-nucleotide"
  modified_base 17..17: /mod_base="OTHER" /note="2'-OMe-nucleotide"
  modified_base 18..18: /mod_base="OTHER" /note="2'-OMe-nucleotide"
  modified_base 19..19: /mod_base="OTHER" /note="2'-OMe-nucleotide"
  misc_feature 19..20: /note="phosphorothioate bond"
  modified_base 20..20: /mod_base="OTHER" /note="2'-OMe-nucleotide"
  misc_feature 20..21: /note="phosphorothioate bond"
  modified_base 21..21: /mod_base="OTHER" /note="2'-OMe-nucleotide"
augaauugucuugaucaauaa

SEQ ID NO: 1144 - DNA, 21 bp, Artificial Sequence
  Description of Artificial Sequence: Synthetic oligonucleotide
  Description of Combined DNA/RNA Molecule: Synthetic oligonucleotide
  N-term hydroxyl group
  C-term hydroxyl group
  modified_base 1..1: /mod_base="OTHER" /note="2'-fluoro-nucleotide"
  misc_feature 1..2: /note="phosphorothioate bond"
  modified_base 2..2: /mod_base="OTHER" /note="2'-fluoro-nucleotide"
  misc_feature 2..3: /note="phosphorothioate bond"
  modified_base 3..3: /mod_base="OTHER" /note="2'-OMe-nucleotide"
  modified_base 4..4: /mod_base="OTHER" /note="2'-fluoro-nucleotide"
  modified_base 5..5: /mod_base="OTHER" /note="2'-OMe-nucleotide"
  modified_base 6..6: /mod_base="OTHER" /note="2'-fluoro-nucleotide"
  modified_base 7..7: /mod_base="OTHER" /note="2'-OMe-nucleotide"
  modified_base 8..8: /mod_base="OTHER" /note="2'-fluoro-nucleotide"
  modified_base 9..9: /mod_base="OTHER" /note="2'-OMe-nucleotide"
  modified_base 10..10: /mod_base="OTHER" /note="2'-OMe-nucleotide"
  modified_base 11..11: /mod_base="OTHER" /note="2'-OMe-nucleotide"
  modified_base 12..12: /mod_base="OTHER" /note="2'-fluoro-nucleotide"
  modified_base 13..13: /mod_base="OTHER" /note="2'-OMe-nucleotide"
  modified_base 14..14: /mod_base="OTHER" /note="2'-fluoro-nucleotide"
  modified_base 15..15: /mod_base="OTHER" /note="2'-OMe-nucleotide"
  modified_base 16..16: /mod_base="OTHER" /note="2'-fluoro-nucleotide"
  modified_base 17..17: /mod_base="OTHER" /note="2'-OMe-nucleotide"
  modified_base 18..18: /mod_base="OTHER" /note="2'-fluoro-nucleotide"
  modified_base 19..19: /mod_base="OTHER" /note="2'-OMe-nucleotide"
  misc_feature 19..20: /note="phosphorothioate bond"
  modified_base 20..20: /mod_base="OTHER" /note="dT"
  misc_feature 20..21: /note="phosphorothioate bond"
  modified_base 21..21: /mod_base="OTHER" /note="dT"
augaauugucuugaucaautt

SEQ ID NO: 1145 - RNA, 21 nt, Artificial Sequence
  Description of Artificial Sequence: Synthetic oligonucleotide
  N-term hydroxyl group
  C-term hydroxyl group
  modified_base 1..1: /mod_base="OTHER" /note="2'-OMe-nucleotide"
  misc_feature 1..2: /note="phosphorothioate bond"
  modified_base 2..2: /mod_base="OTHER" /note="2'-fluoro-nucleotide"
  misc_feature 2..3: /note="phosphorothioate bond"
  modified_base 3..3: /mod_base="OTHER" /note="2'-OMe-nucleotide"
  modified_base 4..4: /mod_base="OTHER" /note="2'-fluoro-nucleotide"
  modified_base 5..5: /mod_base="OTHER" /note="2'-OMe-nucleotide"
  modified_base 6..6: /mod_base="OTHER" /note="2'-OMe-nucleotide"
  modified_base 7..7: /mod_base="OTHER" /note="2'-OMe-nucleotide"
  modified_base 8..8: /mod_base="OTHER" /note="2'-OMe-nucleotide"
  modified_base 9..9: /mod_base="OTHER" /note="2'-OMe-nucleotide"
  modified_base 10..10: /mod_base="OTHER" /note="2'-OMe-nucleotide"
  modified_base 11..11: /mod_base="OTHER" /note="2'-OMe-nucleotide"
  modified_base 12..12: /mod_base="OTHER" /note="2'-OMe-nucleotide"
  modified_base 13..13: /mod_base="OTHER" /note="2'-OMe-nucleotide"
  modified_base 14..14: /mod_base="OTHER" /note="2'-fluoro-nucleotide"
  modified_base 15..15: /mod_base="OTHER" /note="2'-OMe-nucleotide"
  modified_base 16..16: /mod_base="OTHER" /note="2'-fluoro-nucleotide"
  modified_base 17..17: /mod_base="OTHER" /note="2'-OMe-nucleotide"
  modified_base 18..18: /mod_base="OTHER" /note="2'-OMe-nucleotide"
  modified_base 19..19: /mod_base="OTHER" /note="2'-OMe-nucleotide"
  misc_feature 19..20: /note="phosphorothioate bond"
  modified_base 20..20: /mod_base="OTHER" /note="2'-OMe-nucleotide"
  misc_feature 20..21: /note="phosphorothioate bond"
  modified_base 21..21: /mod_base="OTHER" /note="2'-OMe-nucleotide"
augaauugucuugaucaauaa

SEQ ID NO: 1146 - RNA, 21 nt, Artificial Sequence
  Description of Artificial Sequence: Synthetic oligonucleotide
  N-term hydroxyl group
  C-term hydroxyl group
  modified_base 1..1: /mod_base="OTHER" /note="2'-OMe-nucleotide"
  misc_feature 1..2: /note="phosphorothioate bond"
  modified_base 2..2: /mod_base="OTHER" /note="2'-fluoro-nucleotide"
  misc_feature 2..3: /note="phosphorothioate bond"
  modified_base 3..3: /mod_base="OTHER" /note="2'-OMe-nucleotide"
  modified_base 4..4: /mod_base="OTHER" /note="2'-OMe-nucleotide"
  modified_base 5..5: /mod_base="OTHER" /note="2'-OMe-nucleotide"
  modified_base 6..6: /mod_base="OTHER" /note="2'-fluoro-nucleotide"
  modified_base 7..7: /mod_base="OTHER" /note="2'-OMe-nucleotide"
  modified_base 8..8: /mod_base="OTHER" /note="2'-OMe-nucleotide"
  modified_base 9..9: /mod_base="OTHER" /note="2'-OMe-nucleotide"
  modified_base 10..10: /mod_base="OTHER" /note="2'-OMe-nucleotide"
  modified_base 11..11: /mod_base="OTHER" /note="2'-OMe-nucleotide"
  modified_base 12..12: /mod_base="OTHER" /note="2'-OMe-nucleotide"
  modified_base 13..13: /mod_base="OTHER" /note="2'-OMe-nucleotide"
  modified_base 14..14: /mod_base="OTHER" /note="2'-fluoro-nucleotide"
  modified_base 15..15: /mod_base="OTHER" /note="2'-OMe-nucleotide"
  modified_base 16..16: /mod_base="OTHER" /note="2'-fluoro-nucleotide"
  modified_base 17..17: /mod_base="OTHER" /note="2'-OMe-nucleotide"
  modified_base 18..18: /mod_base="OTHER" /note="2'-OMe-nucleotide"
  modified_base 19..19: /mod_base="OTHER" /note="2'-OMe-nucleotide"
  misc_feature 19..20: /note="phosphorothioate bond"
  modified_base 20..20: /mod_base="OTHER" /note="2'-OMe-nucleotide"
  misc_feature 20..21: /note="phosphorothioate bond"
  modified_base 21..21: /mod_base="OTHER" /note="2'-OMe-nucleotide"
augaauugucuugaucaauaa

SEQ ID NO: 1147 - RNA, 21 nt, Artificial Sequence
  Description of Artificial Sequence: Synthetic oligonucleotide
  N-term hydroxyl group
  C-term hydroxyl group
  modified_base 1..1: /mod_base="OTHER" /note="2'-OMe-nucleotide"
  misc_feature 1..2: /note="phosphorothioate bond"
  modified_base 2..2: /mod_base="OTHER" /note="2'-fluoro-nucleotide"
  misc_feature 2..3: /note="phosphorothioate bond"
  modified_base 3..3: /mod_base="OTHER" /note="2'-OMe-nucleotide"
  modified_base 4..4: /mod_base="OTHER" /note="2'-fluoro-nucleotide"
  modified_base 5..5: /mod_base="OTHER" /note="2'-OMe-nucleotide"
  modified_base 6..6: /mod_base="OTHER" /note="2'-OMe-nucleotide"
  modified_base 7..7: /mod_base="OTHER" /note="2'-OMe-nucleotide"
  modified_base 8..8: /mod_base="OTHER" /note="2'-OMe-nucleotide"
  modified_base 9..9: /mod_base="OTHER" /note="2'-fluoro-nucleotide"
  modified_base 10..10: /mod_base="OTHER" /note="2'-OMe-nucleotide"
  modified_base 11..11: /mod_base="OTHER" /note="2'-OMe-nucleotide"
  modified_base 12..12: /mod_base="OTHER" /note="2'-OMe-nucleotide"
  modified_base 13..13: /mod_base="OTHER" /note="2'-OMe-nucleotide"
  modified_base 14..14: /mod_base="OTHER" /note="2'-fluoro-nucleotide"
  modified_base 15..15: /mod_base="OTHER" /note="2'-OMe-nucleotide"
  modified_base 16..16: /mod_base="OTHER" /note="2'-fluoro-nucleotide"
  modified_base 17..17: /mod_base="OTHER" /note="2'-OMe-nucleotide"
  modified_base 18..18: /mod_base="OTHER" /note="2'-OMe-nucleotide"
  modified_base 19..19: /mod_base="OTHER" /note="2'-OMe-nucleotide"
  misc_feature 19..20: /note="phosphorothioate bond"
  modified_base 20..20: /mod_base="OTHER" /note="2'-OMe-nucleotide"
  misc_feature 20..21: /note="phosphorothioate bond"
  modified_base 21..21: /mod_base="OTHER" /note="2'-OMe-nucleotide"
augaauugucuugaucaauaa

SEQ ID NO: 1148 - DNA, 21 bp, Artificial Sequence
  Description of Artificial Sequence: Synthetic oligonucleotide
  Description of Combined DNA/RNA Molecule: Synthetic oligonucleotide
  N-term hydroxyl group
  C-term hydroxyl group
  modified_base 1..1: /mod_base="OTHER" /note="2'-fluoro-nucleotide"
  misc_feature 1..2: /note="phosphorothioate bond"
  modified_base 2..2: /mod_base="OTHER" /note="2'-fluoro-nucleotide"
  misc_feature 2..3: /note="phosphorothioate bond"
  modified_base 3..3: /mod_base="OTHER" /note="2'-OMe-nucleotide"
  modified_base 4..4: /mod_base="OTHER" /note="2'-fluoro-nucleotide"
  modified_base 5..5: /mod_base="OTHER" /note="2'-OMe-nucleotide"
  modified_base 6..6: /mod_base="OTHER" /note="2'-fluoro-nucleotide"
  modified_base 7..7: /mod_base="OTHER" /note="2'-OMe-nucleotide"
  modified_base 8..8: /mod_base="OTHER" /note="2'-fluoro-nucleotide"
  modified_base 9..9: /mod_base="OTHER" /note="2'-OMe-nucleotide"
  modified_base 10..10: /mod_base="OTHER" /note="2'-fluoro-nucleotide"
  modified_base 11..11: /mod_base="OTHER" /note="2'-OMe-nucleotide"
  modified_base 12..12: /mod_base="OTHER" /note="2'-OMe-nucleotide"
  modified_base 13..13: /mod_base="OTHER" /note="2'-OMe-nucleotide"
  modified_base 14..14: /mod_base="OTHER" /note="2'-fluoro-nucleotide"
  modified_base 15..15: /mod_base="OTHER" /note="2'-OMe-nucleotide"
  modified_base 16..16: /mod_base="OTHER" /note="2'-fluoro-nucleotide"
  modified_base 17..17: /mod_base="OTHER" /note="2'-OMe-nucleotide"
  modified_base 18..18: /mod_base="OTHER" /note="2'-fluoro-nucleotide"
  modified_base 19..19: /mod_base="OTHER" /note="2'-OMe-nucleotide"
  misc_feature 19..20: /note="phosphorothioate bond"
  modified_base 20..20: /mod_base="OTHER" /note="dT"
  misc_feature 20..21: /note="phosphorothioate bond"
  modified_base 21..21: /mod_base="OTHER" /note="dT"
augaauugucuugaucaautt

SEQ ID NO: 1149 - RNA, 21 nt, Artificial Sequence
  Description of Artificial Sequence: Synthetic oligonucleotide
  N-term hydroxyl group
  C-term hydroxyl group
  modified_base 1..1: /mod_base="OTHER" /note="2'-OMe-nucleotide"
  misc_feature 1..2: /note="phosphorothioate bond"
  modified_base 2..2: /mod_base="OTHER" /note="2'-fluoro-nucleotide"
  misc_feature 2..3: /note="phosphorothioate bond"
  modified_base 3..3: /mod_base="OTHER" /note="2'-OMe-nucleotide"
  modified_base 4..4: /mod_base="OTHER" /note="2'-fluoro-nucleotide"
  modified_base 5..5: /mod_base="OTHER" /note="2'-OMe-nucleotide"
  modified_base 6..6: /mod_base="OTHER" /note="2'-OMe-nucleotide"
  modified_base 7..7: /mod_base="OTHER" /note="2'-OMe-nucleotide"
  modified_base 8..8: /mod_base="OTHER" /note="2'-OMe-nucleotide"
  modified_base 9..9: /mod_base="OTHER" /note="2'-OMe-nucleotide"
  modified_base 10..10: /mod_base="OTHER" /note="2'-OMe-nucleotide"
  modified_base 11..11: /mod_base="OTHER" /note="2'-OMe-nucleotide"
  modified_base 12..12: /mod_base="OTHER" /note="2'-OMe-nucleotide"
  modified_base 13..13: /mod_base="OTHER" /note="2'-OMe-nucleotide"
  modified_base 14..14: /mod_base="OTHER" /note="2'-fluoro-nucleotide"
  modified_base 15..15: /mod_base="OTHER" /note="2'-OMe-nucleotide"
  modified_base 16..16: /mod_base="OTHER" /note="2'-fluoro-nucleotide"
  modified_base 17..17: /mod_base="OTHER" /note="2'-OMe-nucleotide"
  modified_base 18..18: /mod_base="OTHER" /note="2'-OMe-nucleotide"
  modified_base 19..19: /mod_base="OTHER" /note="2'-OMe-nucleotide"
  misc_feature 19..20: /note="phosphorothioate bond"
  modified_base 20..20: /mod_base="OTHER" /note="2'-OMe-nucleotide"
  misc_feature 20..21: /note="phosphorothioate bond"
  modified_base 21..21: /mod_base="OTHER" /note="2'-OMe-nucleotide"
augaauugucuugaucaauaa

SEQ ID NO: 1150 - RNA, 21 nt, Artificial Sequence
  Description of Artificial Sequence: Synthetic oligonucleotide
  N-term hydroxyl group
  C-term hydroxyl group
  modified_base 1..1: /mod_base="OTHER" /note="2'-OMe-nucleotide"
  misc_feature 1..2: /note="phosphorothioate bond"
  modified_base 2..2: /mod_base="OTHER" /note="2'-fluoro-nucleotide"
  misc_feature 2..3: /note="phosphorothioate bond"
  modified_base 3..3: /mod_base="OTHER" /note="2'-OMe-nucleotide"
  modified_base 4..4: /mod_base="OTHER" /note="2'-OMe-nucleotide"
  modified_base 5..5: /mod_base="OTHER" /note="2'-OMe-nucleotide"
  modified_base 6..6: /mod_base="OTHER" /note="2'-fluoro-nucleotide"
  modified_base 7..7: /mod_base="OTHER" /note="2'-OMe-nucleotide"
  modified_base 8..8: /mod_base="OTHER" /note="2'-OMe-nucleotide"
  modified_base 9..9: /mod_base="OTHER" /note="2'-OMe-nucleotide"
  modified_base 10..10: /mod_base="OTHER" /note="2'-OMe-nucleotide"
  modified_base 11..11: /mod_base="OTHER" /note="2'-OMe-nucleotide"
  modified_base 12..12: /mod_base="OTHER" /note="2'-OMe-nucleotide"
  modified_base 13..13: /mod_base="OTHER" /note="2'-OMe-nucleotide"
  modified_base 14..14: /mod_base="OTHER" /note="2'-fluoro-nucleotide"
  modified_base 15..15: /mod_base="OTHER" /note="2'-OMe-nucleotide"
  modified_base 16..16: /mod_base="OTHER" /note="2'-fluoro-nucleotide"
  modified_base 17..17: /mod_base="OTHER" /note="2'-OMe-nucleotide"
  modified_base 18..18: /mod_base="OTHER" /note="2'-OMe-nucleotide"
  modified_base 19..19: /mod_base="OTHER" /note="2'-OMe-nucleotide"
  misc_feature 19..20: /note="phosphorothioate bond"
  modified_base 20..20: /mod_base="OTHER" /note="2'-OMe-nucleotide"
  misc_feature 20..21: /note="phosphorothioate bond"
  modified_base 21..21: /mod_base="OTHER" /note="2'-OMe-nucleotide"
augaauugucuugaucaauaa

SEQ ID NO: 1151 - RNA, 21 nt, Artificial Sequence
  Description of Artificial Sequence: Synthetic oligonucleotide
  N-term hydroxyl group
  C-term hydroxyl group
  modified_base 1..1: /mod_base="OTHER" /note="2'-OMe-nucleotide"
  misc_feature 1..2: /note="phosphorothioate bond"
  modified_base 2..2: /mod_base="OTHER" /note="2'-fluoro-nucleotide"
  misc_feature 2..3: /note="phosphorothioate bond"
  modified_base 3..3: /mod_base="OTHER" /note="2'-OMe-nucleotide"
  modified_base 4..4: /mod_base="OTHER" /note="2'-fluoro-nucleotide"
  modified_base 5..5: /mod_base="OTHER" /note="2'-OMe-nucleotide"
  modified_base 6..6: /mod_base="OTHER" /note="2'-OMe-nucleotide"
  modified_base 7..7: /mod_base="OTHER" /note="2'-OMe-nucleotide"
  modified_base 8..8: /mod_base="OTHER" /note="2'-OMe-nucleotide"
  modified_base 9..9: /mod_base="OTHER" /note="2'-fluoro-nucleotide"
  modified_base 10..10: /mod_base="OTHER" /note="2'-OMe-nucleotide"
  modified_base 11..11: /mod_base="OTHER" /note="2'-OMe-nucleotide"
  modified_base 12..12: /mod_base="OTHER" /note="2'-OMe-nucleotide"
  modified_base 13..13: /mod_base="OTHER" /note="2'-OMe-nucleotide"
  modified_base 14..14: /mod_base="OTHER" /note="2'-fluoro-nucleotide"
  modified_base 15..15: /mod_base="OTHER" /note="2'-OMe-nucleotide"
  modified_base 16..16: /mod_base="OTHER" /note="2'-fluoro-nucleotide"
  modified_base 17..17: /mod_base="OTHER" /note="2'-OMe-nucleotide"
  modified_base 18..18: /mod_base="OTHER" /note="2'-OMe-nucleotide"
  modified_base 19..19: /mod_base="OTHER" /note="2'-OMe-nucleotide"
  misc_feature 19..20: /note="phosphorothioate bond"
  modified_base 20..20: /mod_base="OTHER" /note="2'-OMe-nucleotide"
  misc_feature 20..21: /note="phosphorothioate bond"
  modified_base 21..21: /mod_base="OTHER" /note="2'-OMe-nucleotide"
augaauugucuugaucaauaa

SEQ ID NO: 1152 - DNA, 21 bp, Artificial Sequence
  Description of Artificial Sequence: Synthetic oligonucleotide
  Description of Combined DNA/RNA Molecule: Synthetic oligonucleotide
  N-term hydroxyl group
  C-term hydroxyl group
  modified_base 1..1: /mod_base="OTHER" /note="2'-fluoro-nucleotide"
  misc_feature 1..2: /note="phosphorothioate bond"
  modified_base 2..2: /mod_base="OTHER" /note="2'-fluoro-nucleotide"
  misc_feature 2..3: /note="phosphorothioate bond"
  modified_base 3..3: /mod_base="OTHER" /note="2'-OMe-nucleotide"
  modified_base 4..4: /mod_base="OTHER" /note="2'-fluoro-nucleotide"
  modified_base 5..5: /mod_base="OTHER" /note="2'-OMe-nucleotide"
  modified_base 6..6: /mod_base="OTHER" /note="2'-fluoro-nucleotide"
  modified_base 7..7: /mod_base="OTHER" /note="2'-OMe-nucleotide"
  modified_base 8..8: /mod_base="OTHER" /note="2'-fluoro-nucleotide"
  modified_base 9..9: /mod_base="OTHER" /note="2'-OMe-nucleotide"
  modified_base 10..10: /mod_base="OTHER" /note="2'-fluoro-nucleotide"
  modified_base 11..11: /mod_base="OTHER" /note="2'-OMe-nucleotide"
  modified_base 12..12: /mod_base="OTHER" /note="2'-OMe-nucleotide"
  modified_base 13..13: /mod_base="OTHER" /note="2'-OMe-nucleotide"
  modified_base 14..14: /mod_base="OTHER" /note="2'-fluoro-nucleotide"
  modified_base 15..15: /mod_base="OTHER" /note="2'-OMe-nucleotide"
  modified_base 16..16: /mod_base="OTHER" /note="2'-fluoro-nucleotide"
  modified_base 17..17: /mod_base="OTHER" /note="2'-OMe-nucleotide"
  modified_base 18..18: /mod_base="OTHER" /note="2'-fluoro-nucleotide"
  modified_base 19..19: /mod_base="OTHER" /note="2'-OMe-nucleotide"
  misc_feature 19..20: /note="phosphorothioate bond"
  modified_base 20..20: /mod_base="OTHER" /note="dT"
  misc_feature 20..21: /note="phosphorothioate bond"
  modified_base 21..21: /mod_base="OTHER" /note="dT"
augaauugucuugaucaautt

SEQ ID NO: 1153 - RNA, 21 nt, Artificial Sequence
  Description of Artificial Sequence: Synthetic oligonucleotide
  N-term hydroxyl group
  C-term hydroxyl group
  modified_base 1..1: /mod_base="OTHER" /note="2'-OMe-nucleotide"
  misc_feature 1..2: /note="phosphorothioate bond"
  modified_base 2..2: /mod_base="OTHER" /note="2'-fluoro-nucleotide"
  misc_feature 2..3: /note="phosphorothioate bond"
  modified_base 3..3: /mod_base="OTHER" /note="2'-OMe-nucleotide"
  modified_base 4..4: /mod_base="OTHER" /note="2'-fluoro-nucleotide"
  modified_base 5..5: /mod_base="OTHER" /note="2'-OMe-nucleotide"
  modified_base 6..6: /mod_base="OTHER" /note="2'-OMe-nucleotide"
  modified_base 7..7: /mod_base="OTHER" /note="2'-OMe-nucleotide"
  modified_base 8..8: /mod_base="OTHER" /note="2'-OMe-nucleotide"
  modified_base 9..9: /mod_base="OTHER" /note="2'-OMe-nucleotide"
  modified_base 10..10: /mod_base="OTHER" /note="2'-OMe-nucleotide"
  modified_base 11..11: /mod_base="OTHER" /note="2'-OMe-nucleotide"
  modified_base 12..12: /mod_base="OTHER" /note="2'-OMe-nucleotide"
  modified_base 13..13: /mod_base="OTHER" /note="2'-OMe-nucleotide"
  modified_base 14..14: /mod_base="OTHER" /note="2'-fluoro-nucleotide"
  modified_base 15..15: /mod_base="OTHER" /note="2'-OMe-nucleotide"
  modified_base 16..16: /mod_base="OTHER" /note="2'-fluoro-nucleotide"
  modified_base 17..17: /mod_base="OTHER" /note="2'-OMe-nucleotide"
  modified_base 18..18: /mod_base="OTHER" /note="2'-OMe-nucleotide"
  modified_base 19..19: /mod_base="OTHER" /note="2'-OMe-nucleotide"
  misc_feature 19..20: /note="phosphorothioate bond"
  modified_base 20..20: /mod_base="OTHER" /note="2'-OMe-nucleotide"
  misc_feature 20..21: /note="phosphorothioate bond"
  modified_base 21..21: /mod_base="OTHER" /note="2'-OMe-nucleotide"
augaauugucuugaucaauaa

SEQ ID NO: 1154 - RNA, 21 nt, Artificial Sequence
  Description of Artificial Sequence: Synthetic oligonucleotide
  N-term hydroxyl group
  C-term hydroxyl group
  modified_base 1..1: /mod_base="OTHER" /note="2'-OMe-nucleotide"
  misc_feature 1..2: /note="phosphorothioate bond"
  modified_base 2..2: /mod_base="OTHER" /note="2'-fluoro-nucleotide"
  misc_feature 2..3: /note="phosphorothioate bond"
  modified_base 3..3: /mod_base="OTHER" /note="2'-OMe-nucleotide"
  modified_base 4..4: /mod_base="OTHER" /note="2'-OMe-nucleotide"
  modified_base 5..5: /mod_base="OTHER" /note="2'-OMe-nucleotide"
  modified_base 6..6: /mod_base="OTHER" /note="2'-fluoro-nucleotide"
  modified_base 7..7: /mod_base="OTHER" /note="2'-OMe-nucleotide"
  modified_base 8..8: /mod_base="OTHER" /note="2'-OMe-nucleotide"
  modified_base 9..9: /mod_base="OTHER" /note="2'-OMe-nucleotide"
  modified_base 10..10: /mod_base="OTHER" /note="2'-OMe-nucleotide"
  modified_base 11..11: /mod_base="OTHER" /note="2'-OMe-nucleotide"
  modified_base 12..12: /mod_base="OTHER" /note="2'-OMe-nucleotide"
  modified_base 13..13: /mod_base="OTHER" /note="2'-OMe-nucleotide"
  modified_base 14..14: /mod_base="OTHER" /note="2'-fluoro-nucleotide"
  modified_base 15..15: /mod_base="OTHER" /note="2'-OMe-nucleotide"
  modified_base 16..16: /mod_base="OTHER" /note="2'-fluoro-nucleotide"
  modified_base 17..17: /mod_base="OTHER" /note="2'-OMe-nucleotide"
  modified_base 18..18: /mod_base="OTHER" /note="2'-OMe-nucleotide"
  modified_base 19..19: /mod_base="OTHER" /note="2'-OMe-nucleotide"
  misc_feature 19..20: /note="phosphorothioate bond"
  modified_base 20..20: /mod_base="OTHER" /note="2'-OMe-nucleotide"
  misc_feature 20..21: /note="phosphorothioate bond"
  modified_base 21..21: /mod_base="OTHER" /note="2'-OMe-nucleotide"
augaauugucuugaucaauaa

SEQ ID NO: 1155 - RNA, 21 nt, Artificial Sequence
  Description of Artificial Sequence: Synthetic oligonucleotide
  N-term hydroxyl group
  C-term hydroxyl group
  modified_base 1..1: /mod_base="OTHER" /note="2'-OMe-nucleotide"
  misc_feature 1..2: /note="phosphorothioate bond"
  modified_base 2..2: /mod_base="OTHER" /note="2'-fluoro-nucleotide"
  misc_feature 2..3: /note="phosphorothioate bond"
  modified_base 3..3: /mod_base="OTHER" /note="2'-OMe-nucleotide"
  modified_base 4..4: /mod_base="OTHER" /note="2'-fluoro-nucleotide"
  modified_base 5..5: /mod_base="OTHER" /note="2'-OMe-nucleotide"
  modified_base 6..6: /mod_base="OTHER" /note="2'-OMe-nucleotide"
  modified_base 7..7: /mod_base="OTHER" /note="2'-OMe-nucleotide"
  modified_base 8..8: /mod_base="OTHER" /note="2'-fluoro-nucleotide"
  modified_base 9..9: /mod_base="OTHER" /note="2'-OMe-nucleotide"
  modified_base 10..10: /mod_base="OTHER" /note="2'-OMe-nucleotide"
  modified_base 11..11: /mod_base="OTHER" /note="2'-OMe-nucleotide"
  modified_base 12..12: /mod_base="OTHER" /note="2'-OMe-nucleotide"
  modified_base 13..13: /mod_base="OTHER" /note="2'-OMe-nucleotide"
  modified_base 14..14: /mod_base="OTHER" /note="2'-fluoro-nucleotide"
  modified_base 15..15: /mod_base="OTHER" /note="2'-OMe-nucleotide"
  modified_base 16..16: /mod_base="OTHER" /note="2'-fluoro-nucleotide"
  modified_base 17..17: /mod_base="OTHER" /note="2'-OMe-nucleotide"
  modified_base 18..18: /mod_base="OTHER" /note="2'-OMe-nucleotide"
  modified_base 19..19: /mod_base="OTHER" /note="2'-OMe-nucleotide"
  misc_feature 19..20: /note="phosphorothioate bond"
  modified_base 20..20: /mod_base="OTHER" /note="2'-OMe-nucleotide"
  misc_feature 20..21: /note="phosphorothioate bond"
  modified_base 21..21: /mod_base="OTHER" /note="2'-OMe-nucleotide"
augaauugucuugaucaauaa

SEQ ID NO: 1156 - RNA, 21 nt, Artificial Sequence
  Description of Artificial Sequence: Synthetic oligonucleotide
  N-term hydroxyl group
  C-term hydroxyl group
  modified_base 1..1: /mod_base="OTHER" /note="2'-OMe-nucleotide"
  misc_feature 1..2: /note="phosphorothioate bond"
  modified_base 2..2: /mod_base="OTHER" /note="2'-fluoro-nucleotide"
  misc_feature 2..3: /note="phosphorothioate bond"
  modified_base 3..3: /mod_base="OTHER" /note="2'-OMe-nucleotide"
  modified_base 4..4: /mod_base="OTHER" /note="2'-OMe-nucleotide"
  modified_base 5..5: /mod_base="OTHER" /note="2'-OMe-nucleotide"
  modified_base 6..6: /mod_base="OTHER" /note="2'-OMe-nucleotide"
  modified_base 7..7: /mod_base="OTHER" /note="2'-OMe-nucleotide"
  modified_base 8..8: /mod_base="OTHER" /note="2'-fluoro-nucleotide"
  modified_base 9..9: /mod_base="OTHER" /note="2'-OMe-nucleotide"
  modified_base 10..10: /mod_base="OTHER" /note="2'-OMe-nucleotide"
  modified_base 11..11: /mod_base="OTHER" /note="2'-OMe-nucleotide"
  modified_base 12..12: /mod_base="OTHER" /note="2'-OMe-nucleotide"
  modified_base 13..13: /mod_base="OTHER" /note="2'-OMe-nucleotide"
  modified_base 14..14: /mod_base="OTHER" /note="2'-fluoro-nucleotide"
  modified_base 15..15: /mod_base="OTHER" /note="2'-OMe-nucleotide"
  modified_base 16..16: /mod_base="OTHER" /note="2'-fluoro-nucleotide"
  modified_base 17..17: /mod_base="OTHER" /note="2'-OMe-nucleotide"
  modified_base 18..18: /mod_base="OTHER" /note="2'-OMe-nucleotide"
  modified_base 19..19: /mod_base="OTHER" /note="2'-OMe-nucleotide"
  misc_feature 19..20: /note="phosphorothioate bond"
  modified_base 20..20: /mod_base="OTHER" /note="2'-OMe-nucleotide"
  misc_feature 20..21: /note="phosphorothioate bond"
  modified_base 21..21: /mod_base="OTHER" /note="2'-OMe-nucleotide"
augaauugucuugaucaauaa

SEQ ID NO: 1157 - DNA, 21 bp, Artificial Sequence
  Description of Artificial Sequence: Synthetic oligonucleotide
  Description of Combined DNA/RNA Molecule: Synthetic oligonucleotide
  N-term hydroxyl group
  C-term hydroxyl group
  modified_base 1..1: /mod_base="OTHER" /note="2'-fluoro-nucleotide"
  misc_feature 1..2: /note="phosphorothioate bond"
  modified_base 2..2: /mod_base="OTHER" /note="2'-fluoro-nucleotide"
  misc_feature 2..3: /note="phosphorothioate bond"
  modified_base 3..3: /mod_base="OTHER" /note="2'-OMe-nucleotide"
  modified_base 4..4: /mod_base="OTHER" /note="2'-fluoro-nucleotide"
  modified_base 5..5: /mod_base="OTHER" /note="2'-OMe-nucleotide"
  modified_base 6..6: /mod_base="OTHER" /note="2'-fluoro-nucleotide"
  modified_base 7..7: /mod_base="OTHER" /note="2'-OMe-nucleotide"
  modified_base 8..8: /mod_base="OTHER" /note="2'-fluoro-nucleotide"
  modified_base 9..9: /mod_base="OTHER" /note="2'-OMe-nucleotide"
  modified_base 10..10: /mod_base="OTHER" /note="2'-OMe-nucleotide"
  modified_base 11..11: /mod_base="OTHER" /note="2'-OMe-nucleotide"
  modified_base 12..12: /mod_base="OTHER" /note="2'-fluoro-nucleotide"
  modified_base 13..13: /mod_base="OTHER" /note="2'-OMe-nucleotide"
  modified_base 14..14: /mod_base="OTHER" /note="2'-fluoro-nucleotide"
  modified_base 15..15: /mod_base="OTHER" /note="2'-OMe-nucleotide"
  modified_base 16..16: /mod_base="OTHER" /note="2'-fluoro-nucleotide"
  modified_base 17..17: /mod_base="OTHER" /note="2'-OMe-nucleotide"
  modified_base 18..18: /mod_base="OTHER" /note="2'-fluoro-nucleotide"
  modified_base 19..19: /mod_base="OTHER" /note="2'-OMe-nucleotide"
  misc_feature 19..20: /note="phosphorothioate bond"
  modified_base 20..20: /mod_base="OTHER" /note="dT"
  misc_feature 20..21: /note="phosphorothioate bond"
  modified_base 21..21: /mod_base="OTHER" /note="dT"
augaauugucuugaucaautt

SEQ ID NO: 1158 - RNA, 21 nt, Artificial Sequence
  Description of Artificial Sequence: Synthetic oligonucleotide
  N-term hydroxyl group
  C-term hydroxyl group
  modified_base 1..1: /mod_base="OTHER" /note="2'-OMe-nucleotide"
  misc_feature 1..2: /note="phosphorothioate bond"
  modified_base 2..2: /mod_base="OTHER" /note="2'-fluoro-nucleotide"
  misc_feature 2..3: /note="phosphorothioate bond"
  modified_base 3..3: /mod_base="OTHER" /note="2'-OMe-nucleotide"
  modified_base 4..4: /mod_base="OTHER" /note="2'-fluoro-nucleotide"
  modified_base 5..5: /mod_base="OTHER" /note="2'-OMe-nucleotide"
  modified_base 6..6: /mod_base="OTHER" /note="2'-OMe-nucleotide"
  modified_base 7..7: /mod_base="OTHER" /note="2'-OMe-nucleotide"
  modified_base 8..8: /mod_base="OTHER" /note="2'-OMe-nucleotide"
  modified_base 9..9: /mod_base="OTHER" /note="2'-OMe-nucleotide"
  modified_base 10..10: /mod_base="OTHER" /note="2'-OMe-nucleotide"
  modified_base 11..11: /mod_base="OTHER" /note="2'-OMe-nucleotide"
  modified_base 12..12: /mod_base="OTHER" /note="2'-OMe-nucleotide"
  modified_base 13..13: /mod_base="OTHER" /note="2'-OMe-nucleotide"
  modified_base 14..14: /mod_base="OTHER" /note="2'-fluoro-nucleotide"
  modified_base 15..15: /mod_base="OTHER" /note="2'-OMe-nucleotide"
  modified_base 16..16: /mod_base="OTHER" /note="2'-fluoro-nucleotide"
  modified_base 17..17: /mod_base="OTHER" /note="2'-OMe-nucleotide"
  modified_base 18..18: /mod_base="OTHER" /note="2'-OMe-nucleotide"
  modified_base 19..19: /mod_base="OTHER" /note="2'-OMe-nucleotide"
  misc_feature 19..20: /note="phosphorothioate bond"
  modified_base 20..20: /mod_base="OTHER" /note="2'-OMe-nucleotide"
  misc_feature 20..21: /note="phosphorothioate bond"
  modified_base 21..21: /mod_base="OTHER" /note="2'-OMe-nucleotide"
augaauugucuugaucaauaa

SEQ ID NO: 1159 - RNA, 21 nt, Artificial Sequence
  Description of Artificial Sequence: Synthetic oligonucleotide
  N-term hydroxyl group
  C-term hydroxyl group
  modified_base 1..1: /mod_base="OTHER" /note="2'-OMe-nucleotide"
  misc_feature 1..2: /note="phosphorothioate bond"
  modified_base 2..2: /mod_base="OTHER" /note="2'-fluoro-nucleotide"
  misc_feature 2..3: /note="phosphorothioate bond"
  modified_base 3..3: /mod_base="OTHER" /note="2'-OMe-nucleotide"
  modified_base 4..4: /mod_base="OTHER" /note="2'-OMe-nucleotide"
  modified_base 5..5: /mod_base="OTHER" /note="2'-OMe-nucleotide"
  modified_base 6..6: /mod_base="OTHER" /note="2'-fluoro-nucleotide"
  modified_base 7..7: /mod_base="OTHER" /note="2'-OMe-nucleotide"
  modified_base 8..8: /mod_base="OTHER" /note="2'-OMe-nucleotide"
  modified_base 9..9: /mod_base="OTHER" /note="2'-OMe-nucleotide"
  modified_base 10..10: /mod_base="OTHER" /note="2'-OMe-nucleotide"
  modified_base 11..11: /mod_base="OTHER" /note="2'-OMe-nucleotide"
  modified_base 12..12: /mod_base="OTHER" /note="2'-OMe-nucleotide"
  modified_base 13..13: /mod_base="OTHER" /note="2'-OMe-nucleotide"
  modified_base 14..14: /mod_base="OTHER" /note="2'-fluoro-nucleotide"
  modified_base 15..15: /mod_base="OTHER" /note="2'-OMe-nucleotide"
  modified_base 16..16: /mod_base="OTHER" /note="2'-fluoro-nucleotide"
  modified_base 17..17: /mod_base="OTHER" /note="2'-OMe-nucleotide"
  modified_base 18..18: /mod_base="OTHER" /note="2'-OMe-nucleotide"
  modified_base 19..19: /mod_base="OTHER" /note="2'-OMe-nucleotide"
  misc_feature 19..20: /note="phosphorothioate bond"
  modified_base 20..20: /mod_base="OTHER" /note="2'-OMe-nucleotide"
  misc_feature 20..21: /note="phosphorothioate bond"
  modified_base 21..21: /mod_base="OTHER" /note="2'-OMe-nucleotide"
augaauugucuugaucaauaa

SEQ ID NO: 1160 - RNA, 21 nt, Artificial Sequence
  Description of Artificial Sequence: Synthetic oligonucleotide
  N-term hydroxyl group
  C-term hydroxyl group
  modified_base 1..1: /mod_base="OTHER" /note="2'-OMe-nucleotide"
  misc_feature 1..2: /note="phosphorothioate bond"
  modified_base 2..2: /mod_base="OTHER" /note="2'-fluoro-nucleotide"
  misc_feature 2..3: /note="phosphorothioate bond"
  modified_base 3..3: /mod_base="OTHER" /note="2'-OMe-nucleotide"
  modified_base 4..4: /mod_base="OTHER" /note="2'-fluoro-nucleotide"
  modified_base 5..5: /mod_base="OTHER" /note="2'-OMe-nucleotide"
  modified_base 6..6: /mod_base="OTHER" /note="2'-OMe-nucleotide"
  modified_base 7..7: /mod_base="OTHER" /note="2'-OMe-nucleotide"
  modified_base 8..8: /mod_base="OTHER" /note="2'-fluoro-nucleotide"
  modified_base 9..9: /mod_base="OTHER" /note="2'-OMe-nucleotide"
  modified_base 10..10: /mod_base="OTHER" /note="2'-OMe-nucleotide"
  modified_base 11..11: /mod_base="OTHER" /note="2'-OMe-nucleotide"
  modified_base 12..12: /mod_base="OTHER" /note="2'-OMe-nucleotide"
  modified_base 13..13: /mod_base="OTHER" /note="2'-OMe-nucleotide"
  modified_base 14..14: /mod_base="OTHER" /note="2'-fluoro-nucleotide"
  modified_base 15..15: /mod_base="OTHER" /note="2'-OMe-nucleotide"
  modified_base 16..16: /mod_base="OTHER" /note="2'-fluoro-nucleotide"
  modified_base 17..17: /mod_base="OTHER" /note="2'-OMe-nucleotide"
  modified_base 18..18: /mod_base="OTHER" /note="2'-OMe-nucleotide"
  modified_base 19..19: /mod_base="OTHER" /note="2'-OMe-nucleotide"
  misc_feature 19..20: /note="phosphorothioate bond"
  modified_base 20..20: /mod_base="OTHER" /note="2'-OMe-nucleotide"
  misc_feature 20..21: /note="phosphorothioate bond"
  modified_base 21..21: /mod_base="OTHER" /note="2'-OMe-nucleotide"
augaauugucuugaucaauaa

SEQ ID NO: 1161 - RNA, 21 nt, Artificial Sequence
  Description of Artificial Sequence: Synthetic oligonucleotide
  N-term hydroxyl group
  C-term hydroxyl group
  modified_base 1..1: /mod_base="OTHER" /note="2'-OMe-nucleotide"
  misc_feature 1..2: /note="phosphorothioate bond"
  modified_base 2..2: /mod_base="OTHER" /note="2'-fluoro-nucleotide"
  misc_feature 2..3: /note="phosphorothioate bond"
  modified_base 3..3: /mod_base="OTHER" /note="2'-OMe-nucleotide"
  modified_base 4..4: /mod_base="OTHER" /note="2'-OMe-nucleotide"
  modified_base 5..5: /mod_base="OTHER" /note="2'-OMe-nucleotide"
  modified_base 6..6: /mod_base="OTHER" /note="2'-OMe-nucleotide"
  modified_base 7..7: /mod_base="OTHER" /note="2'-OMe-nucleotide"
  modified_base 8..8: /mod_base="OTHER" /note="2'-fluoro-nucleotide"
  modified_base 9..9: /mod_base="OTHER" /note="2'-OMe-nucleotide"
  modified_base 10..10: /mod_base="OTHER" /note="2'-OMe-nucleotide"
  modified_base 11..11: /mod_base="OTHER" /note="2'-OMe-nucleotide"
  modified_base 12..12: /mod_base="OTHER" /note="2'-OMe-nucleotide"
  modified_base 13..13: /mod_base="OTHER" /note="2'-OMe-nucleotide"
  modified_base 14..14: /mod_base="OTHER" /note="2'-fluoro-nucleotide"
  modified_base 15..15: /mod_base="OTHER" /note="2'-OMe-nucleotide"
  modified_base 16..16: /mod_base="OTHER" /note="2'-fluoro-nucleotide"
  modified_base 17..17: /mod_base="OTHER" /note="2'-OMe-nucleotide"
  modified_base 18..18: /mod_base="OTHER" /note="2'-OMe-nucleotide"
  modified_base 19..19: /mod_base="OTHER" /note="2'-OMe-nucleotide"
  misc_feature 19..20: /note="phosphorothioate bond"
  modified_base 20..20: /mod_base="OTHER" /note="2'-OMe-nucleotide"
  misc_feature 20..21: /note="phosphorothioate bond"
  modified_base 21..21: /mod_base="OTHER" /note="2'-OMe-nucleotide"
augaauugucuugaucaauaa

SEQ ID NO: 1162 - DNA, 21 bp, Artificial Sequence
  Description of Artificial Sequence: Synthetic oligonucleotide
  Description of Combined DNA/RNA Molecule: Synthetic oligonucleotide
  N-term hydroxyl group
  C-term hydroxyl group
  modified_base 1..1: /mod_base="OTHER" /note="2'-fluoro-nucleotide"
  misc_feature 1..2: /note="phosphorothioate bond"
  modified_base 2..2: /mod_base="OTHER" /note="2'-fluoro-nucleotide"
  misc_feature 2..3: /note="phosphorothioate bond"
  modified_base 3..3: /mod_base="OTHER" /note="2'-OMe-nucleotide"
  modified_base 4..4: /mod_base="OTHER" /note="2'-fluoro-nucleotide"
  modified_base 5..5: /mod_base="OTHER" /note="2'-OMe-nucleotide"
  modified_base 6..6: /mod_base="OTHER" /note="2'-fluoro-nucleotide"
  modified_base 7..7: /mod_base="OTHER" /note="2'-OMe-nucleotide"
  modified_base 8..8: /mod_base="OTHER" /note="2'-fluoro-nucleotide"
  modified_base 9..9: /mod_base="OTHER" /note="2'-OMe-nucleotide"
  modified_base 10..10: /mod_base="OTHER" /note="2'-OMe-nucleotide"
  modified_base 11..11: /mod_base="OTHER" /note="2'-OMe-nucleotide"
  modified_base 12..12: /mod_base="OTHER" /note="2'-fluoro-nucleotide"
  modified_base 13..13: /mod_base="OTHER" /note="2'-OMe-nucleotide"
  modified_base 14..14: /mod_base="OTHER" /note="2'-fluoro-nucleotide"
  modified_base 15..15: /mod_base="OTHER" /note="2'-OMe-nucleotide"
  modified_base 16..16: /mod_base="OTHER" /note="2'-fluoro-nucleotide"
  modified_base 17..17: /mod_base="OTHER" /note="2'-OMe-nucleotide"
  modified_base 18..18: /mod_base="OTHER" /note="2'-fluoro-nucleotide"
  modified_base 19..19: /mod_base="OTHER" /note="2'-OMe-nucleotide"
  misc_feature 19..20: /note="phosphorothioate bond"
  modified_base 20..20: /mod_base="OTHER" /note="dT"
  misc_feature 20..21: /note="phosphorothioate bond"
  modified_base 21..21: /mod_base="OTHER" /note="dT"
augaauugucuugaucaautt

SEQ ID NO: 1163 - RNA, 21 nt, Artificial Sequence
  Description of Artificial Sequence: Synthetic oligonucleotide
  N-term hydroxyl group
  C-term hydroxyl group
  modified_base 1..1: /mod_base="OTHER" /note="2'-OMe-nucleotide"
  misc_feature 1..2: /note="phosphorothioate bond"
  modified_base 2..2: /mod_base="OTHER" /note="2'-fluoro-nucleotide"
  misc_feature 2..3: /note="phosphorothioate bond"
  modified_base 3..3: /mod_base="OTHER" /note="2'-OMe-nucleotide"
  modified_base 4..4: /mod_base="OTHER" /note="2'-fluoro-nucleotide"
  modified_base 5..5: /mod_base="OTHER" /note="2'-OMe-nucleotide"
  modified_base 6..6: /mod_base="OTHER" /note="2'-OMe-nucleotide"
  modified_base 7..7: /mod_base="OTHER" /note="2'-OMe-nucleotide"
  modified_base 8..8: /mod_base="OTHER" /note="2'-OMe-nucleotide"
  modified_base 9..9: /mod_base="OTHER" /note="2'-OMe-nucleotide"
  modified_base 10..10: /mod_base="OTHER" /note="2'-OMe-nucleotide"
  modified_base 11..11: /mod_base="OTHER" /note="2'-OMe-nucleotide"
  modified_base 12..12: /mod_base="OTHER" /note="2'-OMe-nucleotide"
  modified_base 13..13: /mod_base="OTHER" /note="2'-OMe-nucleotide"
  modified_base 14..14: /mod_base="OTHER" /note="2'-fluoro-nucleotide"
  modified_base 15..15: /mod_base="OTHER" /note="2'-OMe-nucleotide"
  modified_base 16..16: /mod_base="OTHER" /note="2'-fluoro-nucleotide"
  modified_base 17..17: /mod_base="OTHER" /note="2'-OMe-nucleotide"
  modified_base 18..18: /mod_base="OTHER" /note="2'-OMe-nucleotide"
  modified_base 19..19: /mod_base="OTHER" /note="2'-OMe-nucleotide"
  misc_feature 19..20: /note="phosphorothioate bond"
  modified_base 20..20: /mod_base="OTHER" /note="2'-OMe-nucleotide"
  misc_feature 20..21: /note="phosphorothioate bond"
  modified_base 21..21: /mod_base="OTHER" /note="2'-OMe-nucleotide"
augaauugucuugaucaauaa

SEQ ID NO: 1164 - RNA, 21 nt, Artificial Sequence
  Description of Artificial Sequence: Synthetic oligonucleotide
  N-term hydroxyl group
  C-term hydroxyl group
  modified_base 1..1: /mod_base="OTHER" /note="2'-OMe-nucleotide"
  misc_feature 1..2: /note="phosphorothioate bond"
  modified_base 2..2: /mod_base="OTHER" /note="2'-fluoro-nucleotide"
  misc_feature 2..3: /note="phosphorothioate bond"
  modified_base 3..3: /mod_base="OTHER" /note="2'-OMe-nucleotide"
  modified_base 4..4: /mod_base="OTHER" /note="2'-OMe-nucleotide"
  modified_base 5..5: /mod_base="OTHER" /note="2'-OMe-nucleotide"
  modified_base 6..6: /mod_base="OTHER" /note="2'-fluoro-nucleotide"
  modified_base 7..7: /mod_base="OTHER" /note="2'-OMe-nucleotide"
  modified_base 8..8: /mod_base="OTHER" /note="2'-OMe-nucleotide"
  modified_base 9..9: /mod_base="OTHER" /note="2'-OMe-nucleotide"
  modified_base 10..10: /mod_base="OTHER" /note="2'-OMe-nucleotide"
  modified_base 11..11: /mod_base="OTHER" /note="2'-OMe-nucleotide"
  modified_base 12..12: /mod_base="OTHER" /note="2'-OMe-nucleotide"
  modified_base 13..13: /mod_base="OTHER" /note="2'-OMe-nucleotide"
  modified_base 14..14: /mod_base="OTHER" /note="2'-fluoro-nucleotide"
  modified_base 15..15: /mod_base="OTHER" /note="2'-OMe-nucleotide"
  modified_base 16..16: /mod_base="OTHER" /note="2'-fluoro-nucleotide"
  modified_base 17..17: /mod_base="OTHER" /note="2'-OMe-nucleotide"
  modified_base 18..18: /mod_base="OTHER" /note="2'-OMe-nucleotide"
  modified_base 19..19: /mod_base="OTHER" /note="2'-OMe-nucleotide"
  misc_feature 19..20: /note="phosphorothioate bond"
  modified_base 20..20: /mod_base="OTHER" /note="2'-OMe-nucleotide"
  misc_feature 20..21: /note="phosphorothioate bond"
  modified_base 21..21: /mod_base="OTHER" /note="2'-OMe-nucleotide"
augaauugucuugaucaauaa

SEQ ID NO: 1165 - RNA, 21 nt, Artificial Sequence
  Description of Artificial Sequence: Synthetic oligonucleotide
  N-term hydroxyl group
  C-term hydroxyl group
  modified_base 1..1: /mod_base="OTHER" /note="2'-OMe-nucleotide"
  misc_feature 1..2: /note="phosphorothioate bond"
  modified_base 2..2: /mod_base="OTHER" /note="2'-fluoro-nucleotide"
  misc_feature 2..3: /note="phosphorothioate bond"
  modified_base 3..3: /mod_base="OTHER" /note="2'-OMe-nucleotide"
  modified_base 4..4: /mod_base="OTHER" /note="2'-fluoro-nucleotide"
  modified_base 5..5: /mod_base="OTHER" /note="2'-OMe-nucleotide"
  modified_base 6..6: /mod_base="OTHER" /note="2'-OMe-nucleotide"
  modified_base 7..7: /mod_base="OTHER" /note="2'-OMe-nucleotide"
  modified_base 8..8: /mod_base="OTHER" /note="2'-OMe-nucleotide"
  modified_base 9..9: /mod_base="OTHER" /note="2'-fluoro-nucleotide"
  modified_base 10..10: /mod_base="OTHER" /note="2'-OMe-nucleotide"
  modified_base 11..11: /mod_base="OTHER" /note="2'-OMe-nucleotide"
  modified_base 12..12: /mod_base="OTHER" /note="2'-OMe-nucleotide"
  modified_base 13..13: /mod_base="OTHER" /note="2'-OMe-nucleotide"
  modified_base 14..14: /mod_base="OTHER" /note="2'-fluoro-nucleotide"
  modified_base 15..15: /mod_base="OTHER" /note="2'-OMe-nucleotide"
  modified_base 16..16: /mod_base="OTHER" /note="2'-fluoro-nucleotide"
  modified_base 17..17: /mod_base="OTHER" /note="2'-OMe-nucleotide"
  modified_base 18..18: /mod_base="OTHER" /note="2'-OMe-nucleotide"
  modified_base 19..19: /mod_base="OTHER" /note="2'-OMe-nucleotide"
  misc_feature 19..20: /note="phosphorothioate bond"
  modified_base 20..20: /mod_base="OTHER" /note="2'-OMe-nucleotide"
  misc_feature 20..21: /note="phosphorothioate bond"
  modified_base 21..21: /mod_base="OTHER" /note="2'-OMe-nucleotide"
augaauugucuugaucaauaa

SEQ ID NO: 1166 - DNA, 21 bp, Artificial Sequence
  Description of Artificial Sequence: Synthetic oligonucleotide
  Description of Combined DNA/RNA Molecule: Synthetic oligonucleotide
  N-term hydroxyl group
  C-term hydroxyl group
  modified_base 1..1: /mod_base="OTHER" /note="2'-fluoro-nucleotide"
  misc_feature 1..2: /note="phosphorothioate bond"
  modified_base 2..2: /mod_base="OTHER" /note="2'-fluoro-nucleotide"
  misc_feature 2..3: /note="phosphorothioate bond"
  modified_base 3..3: /mod_base="OTHER" /note="2'-OMe-nucleotide"
  modified_base 4..4: /mod_base="OTHER" /note="2'-fluoro-nucleotide"
  modified_base 5..5: /mod_base="OTHER" /note="2'-OMe-nucleotide"
  modified_base 6..6: /mod_base="OTHER" /note="2'-fluoro-nucleotide"
  modified_base 7..7: /mod_base="OTHER" /note="2'-OMe-nucleotide"
  modified_base 8..8: /mod_base="OTHER" /note="2'-fluoro-nucleotide"
  modified_base 9..9: /mod_base="OTHER" /note="2'-OMe-nucleotide"
  modified_base 10..10: /mod_base="OTHER" /note="2'-fluoro-nucleotide"
  modified_base 11..11: /mod_base="OTHER" /note="2'-OMe-nucleotide"
  modified_base 12..12: /mod_base="OTHER" /note="2'-OMe-nucleotide"
  modified_base 13..13: /mod_base="OTHER" /note="2'-OMe-nucleotide"
  modified_base 14..14: /mod_base="OTHER" /note="2'-fluoro-nucleotide"
  modified_base 15..15: /mod_base="OTHER" /note="2'-OMe-nucleotide"
  modified_base 16..16: /mod_base="OTHER" /note="2'-fluoro-nucleotide"
  modified_base 17..17: /mod_base="OTHER" /note="2'-OMe-nucleotide"
  modified_base 18..18: /mod_base="OTHER" /note="2'-fluoro-nucleotide"
  modified_base 19..19: /mod_base="OTHER" /note="2'-OMe-nucleotide"
  misc_feature 19..20: /note="phosphorothioate bond"
  modified_base 20..20: /mod_base="OTHER" /note="dT"
  misc_feature 20..21: /note="phosphorothioate bond"
  modified_base 21..21: /mod_base="OTHER" /note="dT"
augaauugucuugaucaautt

SEQ ID NO: 1167 - RNA, 21 nt, Artificial Sequence
  Description of Artificial Sequence: Synthetic oligonucleotide
  N-term hydroxyl group
  C-term hydroxyl group
  modified_base 1..1: /mod_base="OTHER" /note="2'-OMe-nucleotide"
  misc_feature 1..2: /note="phosphorothioate bond"
  modified_base 2..2: /mod_base="OTHER" /note="2'-fluoro-nucleotide"
  misc_feature 2..3: /note="phosphorothioate bond"
  modified_base 3..3: /mod_base="OTHER" /note="2'-OMe-nucleotide"
  modified_base 4..4: /mod_base="OTHER" /note="2'-fluoro-nucleotide"
  modified_base 5..5: /mod_base="OTHER" /note="2'-OMe-nucleotide"
  modified_base 6..6: /mod_base="OTHER" /note="2'-OMe-nucleotide"
  modified_base 7..7: /mod_base="OTHER" /note="2'-OMe-nucleotide"
  modified_base 8..8: /mod_base="OTHER" /note="2'-OMe-nucleotide"
  modified_base 9..9: /mod_base="OTHER" /note="2'-OMe-nucleotide"
  modified_base 10..10: /mod_base="OTHER" /note="2'-OMe-nucleotide"
  modified_base 11..11: /mod_base="OTHER" /note="2'-OMe-nucleotide"
  modified_base 12..12: /mod_base="OTHER" /note="2'-OMe-nucleotide"
  modified_base 13..13: /mod_base="OTHER" /note="2'-OMe-nucleotide"
  modified_base 14..14: /mod_base="OTHER" /note="2'-fluoro-nucleotide"
  modified_base 15..15: /mod_base="OTHER" /note="2'-OMe-nucleotide"
  modified_base 16..16: /mod_base="OTHER" /note="2'-fluoro-nucleotide"
  modified_base 17..17: /mod_base="OTHER" /note="2'-OMe-nucleotide"
  modified_base 18..18: /mod_base="OTHER" /note="2'-OMe-nucleotide"
  modified_base 19..19: /mod_base="OTHER" /note="2'-OMe-nucleotide"
  misc_feature 19..20: /note="phosphorothioate bond"
  modified_base 20..20: /mod_base="OTHER" /note="2'-OMe-nucleotide"
  misc_feature 20..21: /note="phosphorothioate bond"
  modified_base 21..21: /mod_base="OTHER" /note="2'-OMe-nucleotide"
augaauugucuugaucaauaa

SEQ ID NO: 1168 - RNA, 21 nt, Artificial Sequence
  Description of Artificial Sequence: Synthetic oligonucleotide
  N-term hydroxyl group
  C-term hydroxyl group
  modified_base 1..1: /mod_base="OTHER" /note="2'-OMe-nucleotide"
  misc_feature 1..2: /note="phosphorothioate bond"
  modified_base 2..2: /mod_base="OTHER" /note="2'-fluoro-nucleotide"
  misc_feature 2..3: /note="phosphorothioate bond"
  modified_base 3..3: /mod_base="OTHER" /note="2'-OMe-nucleotide"
  modified_base 4..4: /mod_base="OTHER" /note="2'-OMe-nucleotide"
  modified_base 5..5: /mod_base="OTHER" /note="2'-OMe-nucleotide"
  modified_base 6..6: /mod_base="OTHER" /note="2'-fluoro-nucleotide"
  modified_base 7..7: /mod_base="OTHER" /note="2'-OMe-nucleotide"
  modified_base 8..8: /mod_base="OTHER" /note="2'-OMe-nucleotide"
  modified_base 9..9: /mod_base="OTHER" /note="2'-OMe-nucleotide"
  modified_base 10..10: /mod_base="OTHER" /note="2'-OMe-nucleotide"
  modified_base 11..11: /mod_base="OTHER" /note="2'-OMe-nucleotide"
  modified_base 12..12: /mod_base="OTHER" /note="2'-OMe-nucleotide"
  modified_base 13..13: /mod_base="OTHER" /note="2'-OMe-nucleotide"
  modified_base 14..14: /mod_base="OTHER" /note="2'-fluoro-nucleotide"
  modified_base 15..15: /mod_base="OTHER" /note="2'-OMe-nucleotide"
  modified_base 16..16: /mod_base="OTHER" /note="2'-fluoro-nucleotide"
  modified_base 17..17: /mod_base="OTHER" /note="2'-OMe-nucleotide"
  modified_base 18..18: /mod_base="OTHER" /note="2'-OMe-nucleotide"
  modified_base 19..19: /mod_base="OTHER" /note="2'-OMe-nucleotide"
  misc_feature 19..20: /note="phosphorothioate bond"
  modified_base 20..20: /mod_base="OTHER" /note="2'-OMe-nucleotide"
  misc_feature 20..21: /note="phosphorothioate bond"
  modified_base 21..21: /mod_base="OTHER" /note="2'-OMe-nucleotide"
augaauugucuugaucaauaa

SEQ ID NO: 1169 - RNA, 21 nt, Artificial Sequence
  Description of Artificial Sequence: Synthetic oligonucleotide
  N-term hydroxyl group
  C-term hydroxyl group
  modified_base 1..1: /mod_base="OTHER" /note="2'-OMe-nucleotide"
  misc_feature 1..2: /note="phosphorothioate bond"
  modified_base 2..2: /mod_base="OTHER" /note="2'-fluoro-nucleotide"
  misc_feature 2..3: /note="phosphorothioate bond"
  modified_base 3..3: /mod_base="OTHER" /note="2'-OMe-nucleotide"
  modified_base 4..4: /mod_base="OTHER" /note="2'-fluoro-nucleotide"
  modified_base 5..5: /mod_base="OTHER" /note="2'-OMe-nucleotide"
  modified_base 6..6: /mod_base="OTHER" /note="2'-OMe-nucleotide"
  modified_base 7..7: /mod_base="OTHER" /note="2'-OMe-nucleotide"
  modified_base 8..8: /mod_base="OTHER" /note="2'-OMe-nucleotide"
  modified_base 9..9: /mod_base="OTHER" /note="2'-fluoro-nucleotide"
  modified_base 10..10: /mod_base="OTHER" /note="2'-OMe-nucleotide"
  modified_base 11..11: /mod_base="OTHER" /note="2'-OMe-nucleotide"
  modified_base 12..12: /mod_base="OTHER" /note="2'-OMe-nucleotide"
  modified_base 13..13: /mod_base="OTHER" /note="2'-OMe-nucleotide"
  modified_base 14..14: /mod_base="OTHER" /note="2'-fluoro-nucleotide"
  modified_base 15..15: /mod_base="OTHER" /note="2'-OMe-nucleotide"
  modified_base 16..16: /mod_base="OTHER" /note="2'-fluoro-nucleotide"
  modified_base 17..17: /mod_base="OTHER" /note="2'-OMe-nucleotide"
  modified_base 18..18: /mod_base="OTHER" /note="2'-OMe-nucleotide"
  modified_base 19..19: /mod_base="OTHER" /note="2'-OMe-nucleotide"
  misc_feature 19..20: /note="phosphorothioate bond"
  modified_base 20..20: /mod_base="OTHER" /note="2'-OMe-nucleotide"
  misc_feature 20..21: /note="phosphorothioate bond"
  modified_base 21..21: /mod_base="OTHER" /note="2'-OMe-nucleotide"
augaauugucuugaucaauaa

SEQ ID NO: 1170 - DNA, 21 bp, Artificial Sequence
  Description of Artificial Sequence: Synthetic oligonucleotide
  Description of Combined DNA/RNA Molecule: Synthetic oligonucleotide
  N-term hydroxyl group
  C-term hydroxyl group
  modified_base 1..1: /mod_base="OTHER" /note="2'-fluoro-nucleotide"
  misc_feature 1..2: /note="phosphorothioate bond"
  modified_base 2..2: /mod_base="OTHER" /note="2'-fluoro-nucleotide"
  misc_feature 2..3: /note="phosphorothioate bond"
  modified_base 3..3: /mod_base="OTHER" /note="2'-OMe-nucleotide"
  modified_base 4..4: /mod_base="OTHER" /note="2'-fluoro-nucleotide"
  modified_base 5..5: /mod_base="OTHER" /note="2'-OMe-nucleotide"
  modified_base 6..6: /mod_base="OTHER" /note="2'-fluoro-nucleotide"
  modified_base 7..7: /mod_base="OTHER" /note="2'-OMe-nucleotide"
  modified_base 8..8: /mod_base="OTHER" /note="2'-fluoro-nucleotide"
  modified_base 9..9: /mod_base="OTHER" /note="2'-OMe-nucleotide"
  modified_base 10..10: /mod_base="OTHER" /note="2'-fluoro-nucleotide"
  modified_base 11..11: /mod_base="OTHER" /note="2'-OMe-nucleotide"
  modified_base 12..12: /mod_base="OTHER" /note="2'-OMe-nucleotide"
  modified_base 13..13: /mod_base="OTHER" /note="2'-OMe-nucleotide"
  modified_base 14..14: /mod_base="OTHER" /note="2'-fluoro-nucleotide"
  modified_base 15..15: /mod_base="OTHER" /note="2'-OMe-nucleotide"
  modified_base 16..16: /mod_base="OTHER" /note="2'-fluoro-nucleotide"
  modified_base 17..17: /mod_base="OTHER" /note="2'-OMe-nucleotide"
  modified_base 18..18: /mod_base="OTHER" /note="2'-fluoro-nucleotide"
  modified_base 19..19: /mod_base="OTHER" /note="2'-OMe-nucleotide"
  misc_feature 19..20: /note="phosphorothioate bond"
  modified_base 20..20: /mod_base="OTHER" /note="dT"
  misc_feature 20..21: /note="phosphorothioate bond"
  modified_base 21..21: /mod_base="OTHER" /note="dT"
augaauugucuugaucaautt

SEQ ID NO: 1171 - RNA, 21 nt, Artificial Sequence
  Description of Artificial Sequence: Synthetic oligonucleotide
  N-term hydroxyl group
  C-term hydroxyl group
  modified_base 1..1: /mod_base="OTHER" /note="2'-OMe-nucleotide"
  misc_feature 1..2: /note="phosphorothioate bond"
  modified_base 2..2: /mod_base="OTHER" /note="2'-fluoro-nucleotide"
  misc_feature 2..3: /note="phosphorothioate bond"
  modified_base 3..3: /mod_base="OTHER" /note="2'-OMe-nucleotide"
  modified_base 4..4: /mod_base="OTHER" /note="2'-fluoro-nucleotide"
  modified_base 5..5: /mod_base="OTHER" /note="2'-OMe-nucleotide"
  modified_base 6..6: /mod_base="OTHER" /note="2'-OMe-nucleotide"
  modified_base 7..7: /mod_base="OTHER" /note="2'-OMe-nucleotide"
  modified_base 8..8: /mod_base="OTHER" /note="2'-OMe-nucleotide"
  modified_base 9..9: /mod_base="OTHER" /note="2'-OMe-nucleotide"
  modified_base 10..10: /mod_base="OTHER" /note="2'-OMe-nucleotide"
  modified_base 11..11: /mod_base="OTHER" /note="2'-OMe-nucleotide"
  modified_base 12..12: /mod_base="OTHER" /note="2'-OMe-nucleotide"
  modified_base 13..13: /mod_base="OTHER" /note="2'-OMe-nucleotide"
  modified_base 14..14: /mod_base="OTHER" /note="2'-fluoro-nucleotide"
  modified_base 15..15: /mod_base="OTHER" /note="2'-OMe-nucleotide"
  modified_base 16..16: /mod_base="OTHER" /note="2'-fluoro-nucleotide"
  modified_base 17..17: /mod_base="OTHER" /note="2'-OMe-nucleotide"
  modified_base 18..18: /mod_base="OTHER" /note="2'-OMe-nucleotide"
  modified_base 19..19: /mod_base="OTHER" /note="2'-OMe-nucleotide"
  misc_feature 19..20: /note="phosphorothioate bond"
  modified_base 20..20: /mod_base="OTHER" /note="2'-OMe-nucleotide"
  misc_feature 20..21: /note="phosphorothioate bond"
  modified_base 21..21: /mod_base="OTHER" /note="2'-OMe-nucleotide"
augaauugucuugaucaauaa

SEQ ID NO: 1172 - RNA, 21 nt, Artificial Sequence
  Description of Artificial Sequence: Synthetic oligonucleotide
  N-term hydroxyl group
  C-term hydroxyl group
  modified_base 1..1: /mod_base="OTHER" /note="2'-OMe-nucleotide"
  misc_feature 1..2: /note="phosphorothioate bond"
  modified_base 2..2: /mod_base="OTHER" /note="2'-fluoro-nucleotide"
  misc_feature 2..3: /note="phosphorothioate bond"
  modified_base 3..3: /mod_base="OTHER" /note="2'-OMe-nucleotide"
  modified_base 4..4: /mod_base="OTHER" /note="2'-OMe-nucleotide"
  modified_base 5..5: /mod_base="OTHER" /note="2'-OMe-nucleotide"
  modified_base 6..6: /mod_base="OTHER" /note="2'-fluoro-nucleotide"
  modified_base 7..7: /mod_base="OTHER" /note="2'-OMe-nucleotide"
  modified_base 8..8: /mod_base="OTHER" /note="2'-OMe-nucleotide"
  modified_base 9..9: /mod_base="OTHER" /note="2'-OMe-nucleotide"
  modified_base 10..10: /mod_base="OTHER" /note="2'-OMe-nucleotide"
  modified_base 11..11: /mod_base="OTHER" /note="2'-OMe-nucleotide"
  modified_base 12..12: /mod_base="OTHER" /note="2'-OMe-nucleotide"
  modified_base 13..13: /mod_base="OTHER" /note="2'-OMe-nucleotide"
  modified_base 14..14: /mod_base="OTHER" /note="2'-fluoro-nucleotide"
  modified_base 15..15: /mod_base="OTHER" /note="2'-OMe-nucleotide"
  modified_base 16..16: /mod_base="OTHER" /note="2'-fluoro-nucleotide"
  modified_base 17..17: /mod_base="OTHER" /note="2'-OMe-nucleotide"
  modified_base 18..18: /mod_base="OTHER" /note="2'-OMe-nucleotide"
  modified_base 19..19: /mod_base="OTHER" /note="2'-OMe-nucleotide"
  misc_feature 19..20: /note="phosphorothioate bond"
  modified_base 20..20: /mod_base="OTHER" /note="2'-OMe-nucleotide"
  misc_feature 20..21: /note="phosphorothioate bond"
  modified_base 21..21: /mod_base="OTHER" /note="2'-OMe-nucleotide"
augaauugucuugaucaauaa

SEQ ID NO: 1173 - RNA, 21 nt, Artificial Sequence
  Description of Artificial Sequence: Synthetic oligonucleotide
  N-term hydroxyl group
  C-term hydroxyl group
  modified_base 1..1: /mod_base="OTHER" /note="2'-OMe-nucleotide"
  misc_feature 1..2: /note="phosphorothioate bond"
  modified_base 2..2: /mod_base="OTHER" /note="2'-fluoro-nucleotide"
  misc_feature 2..3: /note="phosphorothioate bond"
  modified_base 3..3: /mod_base="OTHER" /note="2'-OMe-nucleotide"
  modified_base 4..4: /mod_base="OTHER" /note="2'-fluoro-nucleotide"
  modified_base 5..5: /mod_base="OTHER" /note="2'-OMe-nucleotide"
  modified_base 6..6: /mod_base="OTHER" /note="2'-OMe-nucleotide"
  modified_base 7..7: /mod_base="OTHER" /note="2'-OMe-nucleotide"
  modified_base 8..8: /mod_base="OTHER" /note="2'-fluoro-nucleotide"
  modified_base 9..9: /mod_base="OTHER" /note="2'-OMe-nucleotide"
  modified_base 10..10: /mod_base="OTHER" /note="2'-OMe-nucleotide"
  modified_base 11..11: /mod_base="OTHER" /note="2'-OMe-nucleotide"
  modified_base 12..12: /mod_base="OTHER" /note="2'-OMe-nucleotide"
  modified_base 13..13: /mod_base="OTHER" /note="2'-OMe-nucleotide"
  modified_base 14..14: /mod_base="OTHER" /note="2'-fluoro-nucleotide"
  modified_base 15..15: /mod_base="OTHER" /note="2'-OMe-nucleotide"
  modified_base 16..16: /mod_base="OTHER" /note="2'-fluoro-nucleotide"
  modified_base 17..17: /mod_base="OTHER" /note="2'-OMe-nucleotide"
  modified_base 18..18: /mod_base="OTHER" /note="2'-OMe-nucleotide"
  modified_base 19..19: /mod_base="OTHER" /note="2'-OMe-nucleotide"
  misc_feature 19..20: /note="phosphorothioate bond"
  modified_base 20..20: /mod_base="OTHER" /note="2'-OMe-nucleotide"
  misc_feature 20..21: /note="phosphorothioate bond"
  modified_base 21..21: /mod_base="OTHER" /note="2'-OMe-nucleotide"
augaauugucuugaucaauaa

SEQ ID NO: 1174 - RNA, 21 nt, Artificial Sequence
  Description of Artificial Sequence: Synthetic oligonucleotide
  N-term hydroxyl group
  C-term hydroxyl group
  modified_base 1..1: /mod_base="OTHER" /note="2'-OMe-nucleotide"
  misc_feature 1..2: /note="phosphorothioate bond"
  modified_base 2..2: /mod_base="OTHER" /note="2'-fluoro-nucleotide"
  misc_feature 2..3: /note="phosphorothioate bond"
  modified_base 3..3: /mod_base="OTHER" /note="2'-OMe-nucleotide"
  modified_base 4..4: /mod_base="OTHER" /note="2'-OMe-nucleotide"
  modified_base 5..5: /mod_base="OTHER" /note="2'-OMe-nucleotide"
  modified_base 6..6: /mod_base="OTHER" /note="2'-OMe-nucleotide"
  modified_base 7..7: /mod_base="OTHER" /note="2'-OMe-nucleotide"
  modified_base 8..8: /mod_base="OTHER" /note="2'-fluoro-nucleotide"
  modified_base 9..9: /mod_base="OTHER" /note="2'-OMe-nucleotide"
  modified_base 10..10: /mod_base="OTHER" /note="2'-OMe-nucleotide"
  modified_base 11..11: /mod_base="OTHER" /note="2'-OMe-nucleotide"
  modified_base 12..12: /mod_base="OTHER" /note="2'-OMe-nucleotide"
  modified_base 13..13: /mod_base="OTHER" /note="2'-OMe-nucleotide"
  modified_base 14..14: /mod_base="OTHER" /note="2'-fluoro-nucleotide"
  modified_base 15..15: /mod_base="OTHER" /note="2'-OMe-nucleotide"
  modified_base 16..16: /mod_base="OTHER" /note="2'-fluoro-nucleotide"
  modified_base 17..17: /mod_base="OTHER" /note="2'-OMe-nucleotide"
  modified_base 18..18: /mod_base="OTHER" /note="2'-OMe-nucleotide"
  modified_base 19..19: /mod_base="OTHER" /note="2'-OMe-nucleotide"
  misc_feature 19..20: /note="phosphorothioate bond"
  modified_base 20..20: /mod_base="OTHER" /note="2'-OMe-nucleotide"
  misc_feature 20..21: /note="phosphorothioate bond"
  modified_base 21..21: /mod_base="OTHER" /note="2'-OMe-nucleotide"
augaauugucuugaucaauaa

SEQ ID NO: 1175 - DNA, 21 bp, Artificial Sequence
  Description of Artificial Sequence: Synthetic oligonucleotide
  Description of Combined DNA/RNA Molecule: Synthetic oligonucleotide
  N-term hydroxyl group
  C-term hydroxyl group
  modified_base 1..1: /mod_base="OTHER" /note="2'-fluoro-nucleotide"
  misc_feature 1..2: /note="phosphorothioate bond"
  modified_base 2..2: /mod_base="OTHER" /note="2'-fluoro-nucleotide"
  misc_feature 2..3: /note="phosphorothioate bond"
  modified_base 3..3: /mod_base="OTHER" /note="2'-OMe-nucleotide"
  modified_base 4..4: /mod_base="OTHER" /note="2'-fluoro-nucleotide"
  modified_base 5..5: /mod_base="OTHER" /note="2'-OMe-nucleotide"
  modified_base 6..6: /mod_base="OTHER" /note="2'-fluoro-nucleotide"
  modified_base 7..7: /mod_base="OTHER" /note="2'-OMe-nucleotide"
  modified_base 8..8: /mod_base="OTHER" /note="2'-fluoro-nucleotide"
  modified_base 9..9: /mod_base="OTHER" /note="2'-OMe-nucleotide"
  modified_base 10..10: /mod_base="OTHER" /note="2'-OMe-nucleotide"
  modified_base 11..11: /mod_base="OTHER" /note="2'-OMe-nucleotide"
  modified_base 12..12: /mod_base="OTHER" /note="2'-fluoro-nucleotide"
  modified_base 13..13: /mod_base="OTHER" /note="2'-OMe-nucleotide"
  modified_base 14..14: /mod_base="OTHER" /note="2'-fluoro-nucleotide"
  modified_base 15..15: /mod_base="OTHER" /note="2'-OMe-nucleotide"
  modified_base 16..16: /mod_base="OTHER" /note="2'-fluoro-nucleotide"
  modified_base 17..17: /mod_base="OTHER" /note="2'-OMe-nucleotide"
  modified_base 18..18: /mod_base="OTHER" /note="2'-fluoro-nucleotide"
  modified_base 19..19: /mod_base="OTHER" /note="2'-OMe-nucleotide"
  misc_feature 19..20: /note="phosphorothioate bond"
  modified_base 20..20: /mod_base="OTHER" /note="dT"
  misc_feature 20..21: /note="phosphorothioate bond"
  modified_base 21..21: /mod_base="OTHER" /note="dT"
augaauugucuugaucaautt

SEQ ID NO: 1176 - RNA, 21 nt, Artificial Sequence
  Description of Artificial Sequence: Synthetic oligonucleotide
  N-term hydroxyl group
  C-term hydroxyl group
  modified_base 1..1: /mod_base="OTHER" /note="2'-OMe-nucleotide"
  misc_feature 1..2: /note="phosphorothioate bond"
  modified_base 2..2: /mod_base="OTHER" /note="2'-fluoro-nucleotide"
  misc_feature 2..3: /note="phosphorothioate bond"
  modified_base 3..3: /mod_base="OTHER" /note="2'-OMe-nucleotide"
  modified_base 4..4: /mod_base="OTHER" /note="2'-fluoro-nucleotide"
  modified_base 5..5: /mod_base="OTHER" /note="2'-OMe-nucleotide"
  modified_base 6..6: /mod_base="OTHER" /note="2'-OMe-nucleotide"
  modified_base 7..7: /mod_base="OTHER" /note="2'-OMe-nucleotide"
  modified_base 8..8: /mod_base="OTHER" /note="2'-OMe-nucleotide"
  modified_base 9..9: /mod_base="OTHER" /note="2'-OMe-nucleotide"
  modified_base 10..10: /mod_base="OTHER" /note="2'-OMe-nucleotide"
  modified_base 11..11: /mod_base="OTHER" /note="2'-OMe-nucleotide"
  modified_base 12..12: /mod_base="OTHER" /note="2'-OMe-nucleotide"
  modified_base 13..13: /mod_base="OTHER" /note="2'-OMe-nucleotide"
  modified_base 14..14: /mod_base="OTHER" /note="2'-fluoro-nucleotide"
  modified_base 15..15: /mod_base="OTHER" /note="2'-OMe-nucleotide"
  modified_base 16..16: /mod_base="OTHER" /note="2'-fluoro-nucleotide"
  modified_base 17..17: /mod_base="OTHER" /note="2'-OMe-nucleotide"
  modified_base 18..18: /mod_base="OTHER" /note="2'-OMe-nucleotide"
  modified_base 19..19: /mod_base="OTHER" /note="2'-OMe-nucleotide"
  misc_feature 19..20: /note="phosphorothioate bond"
  modified_base 20..20: /mod_base="OTHER" /note="2'-OMe-nucleotide"
  misc_feature 20..21: /note="phosphorothioate bond"
  modified_base 21..21: /mod_base="OTHER" /note="2'-OMe-nucleotide"
augaauugucuugaucaauaa

SEQ ID NO: 1177 - RNA, 21 nt, Artificial Sequence
  Description of Artificial Sequence: Synthetic oligonucleotide
  N-term hydroxyl group
  C-term hydroxyl group
  modified_base 1..1: /mod_base="OTHER" /note="2'-OMe-nucleotide"
  misc_feature 1..2: /note="phosphorothioate bond"
  modified_base 2..2: /mod_base="OTHER" /note="2'-fluoro-nucleotide"
  misc_feature 2..3: /note="phosphorothioate bond"
  modified_base 3..3: /mod_base="OTHER" /note="2'-OMe-nucleotide"
  modified_base 4..4: /mod_base="OTHER" /note="2'-OMe-nucleotide"
  modified_base 5..5: /mod_base="OTHER" /note="2'-OMe-nucleotide"
  modified_base 6..6: /mod_base="OTHER" /note="2'-fluoro-nucleotide"
  modified_base 7..7: /mod_base="OTHER" /note="2'-OMe-nucleotide"
  modified_base 8..8: /mod_base="OTHER" /note="2'-OMe-nucleotide"
  modified_base 9..9: /mod_base="OTHER" /note="2'-OMe-nucleotide"
  modified_base 10..10: /mod_base="OTHER" /note="2'-OMe-nucleotide"
  modified_base 11..11: /mod_base="OTHER" /note="2'-OMe-nucleotide"
  modified_base 12..12: /mod_base="OTHER" /note="2'-OMe-nucleotide"
  modified_base 13..13: /mod_base="OTHER" /note="2'-OMe-nucleotide"
  modified_base 14..14: /mod_base="OTHER" /note="2'-fluoro-nucleotide"
  modified_base 15..15: /mod_base="OTHER" /note="2'-OMe-nucleotide"
  modified_base 16..16: /mod_base="OTHER" /note="2'-fluoro-nucleotide"
  modified_base 17..17: /mod_base="OTHER" /note="2'-OMe-nucleotide"
  modified_base 18..18: /mod_base="OTHER" /note="2'-OMe-nucleotide"
  modified_base 19..19: /mod_base="OTHER" /note="2'-OMe-nucleotide"
  misc_feature 19..20: /note="phosphorothioate bond"
  modified_base 20..20: /mod_base="OTHER" /note="2'-OMe-nucleotide"
  misc_feature 20..21: /note="phosphorothioate bond"
  modified_base 21..21: /mod_base="OTHER" /note="2'-OMe-nucleotide"
augaauugucuugaucaauaa

SEQ ID NO: 1178 - RNA, 21 nt, Artificial Sequence
  Description of Artificial Sequence: Synthetic oligonucleotide
  N-term hydroxyl group
  C-term hydroxyl group
  modified_base 1..1: /mod_base="OTHER" /note="2'-OMe-nucleotide"
  misc_feature 1..2: /note="phosphorothioate bond"
  modified_base 2..2: /mod_base="OTHER" /note="2'-fluoro-nucleotide"
  misc_feature 2..3: /note="phosphorothioate bond"
  modified_base 3..3: /mod_base="OTHER" /note="2'-OMe-nucleotide"
  modified_base 4..4: /mod_base="OTHER" /note="2'-fluoro-nucleotide"
  modified_base 5..5: /mod_base="OTHER" /note="2'-OMe-nucleotide"
  modified_base 6..6: /mod_base="OTHER" /note="2'-OMe-nucleotide"
  modified_base 7..7: /mod_base="OTHER" /note="2'-OMe-nucleotide"
  modified_base 8..8: /mod_base="OTHER" /note="2'-fluoro-nucleotide"
  modified_base 9..9: /mod_base="OTHER" /note="2'-OMe-nucleotide"
  modified_base 10..10: /mod_base="OTHER" /note="2'-OMe-nucleotide"
  modified_base 11..11: /mod_base="OTHER" /note="2'-OMe-nucleotide"
  modified_base 12..12: /mod_base="OTHER" /note="2'-OMe-nucleotide"
  modified_base 13..13: /mod_base="OTHER" /note="2'-OMe-nucleotide"
  modified_base 14..14: /mod_base="OTHER" /note="2'-fluoro-nucleotide"
  modified_base 15..15: /mod_base="OTHER" /note="2'-OMe-nucleotide"
  modified_base 16..16: /mod_base="OTHER" /note="2'-fluoro-nucleotide"
  modified_base 17..17: /mod_base="OTHER" /note="2'-OMe-nucleotide"
  modified_base 18..18: /mod_base="OTHER" /note="2'-OMe-nucleotide"
  modified_base 19..19: /mod_base="OTHER" /note="2'-OMe-nucleotide"
  misc_feature 19..20: /note="phosphorothioate bond"
  modified_base 20..20: /mod_base="OTHER" /note="2'-OMe-nucleotide"
  misc_feature 20..21: /note="phosphorothioate bond"
  modified_base 21..21: /mod_base="OTHER" /note="2'-OMe-nucleotide"
augaauugucuugaucaauaa

SEQ ID NO: 1179 - RNA, 21 nt, Artificial Sequence
  Description of Artificial Sequence: Synthetic oligonucleotide
  N-term hydroxyl group
  C-term hydroxyl group
  modified_base 1..1: /mod_base="OTHER" /note="2'-OMe-nucleotide"
  misc_feature 1..2: /note="phosphorothioate bond"
  modified_base 2..2: /mod_base="OTHER" /note="2'-fluoro-nucleotide"
  misc_feature 2..3: /note="phosphorothioate bond"
  modified_base 3..3: /mod_base="OTHER" /note="2'-OMe-nucleotide"
  modified_base 4..4: /mod_base="OTHER" /note="2'-OMe-nucleotide"
  modified_base 5..5: /mod_base="OTHER" /note="2'-OMe-nucleotide"
  modified_base 6..6: /mod_base="OTHER" /note="2'-OMe-nucleotide"
  modified_base 7..7: /mod_base="OTHER" /note="2'-OMe-nucleotide"
  modified_base 8..8: /mod_base="OTHER" /note="2'-fluoro-nucleotide"
  modified_base 9..9: /mod_base="OTHER" /note="2'-OMe-nucleotide"
  modified_base 10..10: /mod_base="OTHER" /note="2'-OMe-nucleotide"
  modified_base 11..11: /mod_base="OTHER" /note="2'-OMe-nucleotide"
  modified_base 12..12: /mod_base="OTHER" /note="2'-OMe-nucleotide"
  modified_base 13..13: /mod_base="OTHER" /note="2'-OMe-nucleotide"
  modified_base 14..14: /mod_base="OTHER" /note="2'-fluoro-nucleotide"
  modified_base 15..15: /mod_base="OTHER" /note="2'-OMe-nucleotide"
  modified_base 16..16: /mod_base="OTHER" /note="2'-fluoro-nucleotide"
  modified_base 17..17: /mod_base="OTHER" /note="2'-OMe-nucleotide"
  modified_base 18..18: /mod_base="OTHER" /note="2'-OMe-nucleotide"
  modified_base 19..19: /mod_base="OTHER" /note="2'-OMe-nucleotide"
  misc_feature 19..20: /note="phosphorothioate bond"
  modified_base 20..20: /mod_base="OTHER" /note="2'-OMe-nucleotide"
  misc_feature 20..21: /note="phosphorothioate bond"
  modified_base 21..21: /mod_base="OTHER" /note="2'-OMe-nucleotide"
augaauugucuugaucaauaa

SEQ ID NO: 1180 - DNA, 21 bp, Artificial Sequence
  Description of Artificial Sequence: Synthetic oligonucleotide
  Description of Combined DNA/RNA Molecule: Synthetic oligonucleotide
  N-term hydroxyl group
  C-term hydroxyl group
  modified_base 1..1: /mod_base="OTHER" /note="2'-fluoro-nucleotide"
  misc_feature 1..2: /note="phosphorothioate bond"
  modified_base 2..2: /mod_base="OTHER" /note="2'-fluoro-nucleotide"
  misc_feature 2..3: /note="phosphorothioate bond"
  modified_base 3..3: /mod_base="OTHER" /note="2'-OMe-nucleotide"
  modified_base 4..4: /mod_base="OTHER" /note="2'-fluoro-nucleotide"
  modified_base 5..5: /mod_base="OTHER" /note="2'-OMe-nucleotide"
  modified_base 6..6: /mod_base="OTHER" /note="2'-fluoro-nucleotide"
  modified_base 7..7: /mod_base="OTHER" /note="2'-OMe-nucleotide"
  modified_base 8..8: /mod_base="OTHER" /note="2'-fluoro-nucleotide"
  modified_base 9..9: /mod_base="OTHER" /note="2'-OMe-nucleotide"
  modified_base 10..10: /mod_base="OTHER" /note="2'-OMe-nucleotide"
  modified_base 11..11: /mod_base="OTHER" /note="2'-OMe-nucleotide"
  modified_base 12..12: /mod_base="OTHER" /note="2'-fluoro-nucleotide"
  modified_base 13..13: /mod_base="OTHER" /note="2'-OMe-nucleotide"
  modified_base 14..14: /mod_base="OTHER" /note="2'-fluoro-nucleotide"
  modified_base 15..15: /mod_base="OTHER" /note="2'-OMe-nucleotide"
  modified_base 16..16: /mod_base="OTHER" /note="2'-fluoro-nucleotide"
  modified_base 17..17: /mod_base="OTHER" /note="2'-OMe-nucleotide"
  modified_base 18..18: /mod_base="OTHER" /note="2'-fluoro-nucleotide"
  modified_base 19..19: /mod_base="OTHER" /note="2'-OMe-nucleotide"
  misc_feature 19..20: /note="phosphorothioate bond"
  modified_base 20..20: /mod_base="OTHER" /note="dT"
  misc_feature 20..21: /note="phosphorothioate bond"
  modified_base 21..21: /mod_base="OTHER" /note="dT"
augaauugucuugaucaautt

SEQ ID NO: 1181 - DNA, 2951 bp, Homo sapiens
atatatagagttaagaagtctaggtctgcttccagaagaaaacagttccacgttgcttgaaattgaaaatcaagataaaaatgttcacaattaagctccttctttttattgttcctctagttatttcctccagaattgatcaagacaattcatcatttgattctctatctccagagccaaaatcaagatttgctatgttagacgatgtaaaaattttagccaatggcctccttcagttgggacatggtcttaaagactttgtccataagacgaagggccaaattaatgacatatttcaaaaactcaacatatttgatcagtctttttatgatctatcgctgcaaaccagtgaaatcaaagaagaagaaaaggaactgagaagaactacatataaactacaagtcaaaaatgaagaggtaaagaatatgtcacttgaactcaactcaaaacttgaaagcctcctagaagaaaaaattctacttcaacaaaaagtgaaatatttagaagagcaactaactaacttaattcaaaatcaacctgaaactccagaacacccagaagtaacttcacttaaaacttttgtagaaaaacaagataatagcatcaaagaccttctccagaccgtggaagaccaatataaacaattaaaccaacagcatagtcaaataaaagaaatagaaaatcagctcagaaggactagtattcaagaacccacagaaatttctctatcttccaagccaagagcaccaagaactactccctttcttcagttgaatgaaataagaaatgtaaaacatgatggcattcctgctgaatgtaccaccatttataacagaggtgaacatacaagtggcatgtatgccatcagacccagcaactctcaagtttttcatgtctactgtgatgttatatcaggtagtccatggacattaattcaacatcgaatagatggatcacaaaacttcaatgaaacgtgggagaactacaaatatggttttgggaggcttgatggagaattttggttgggcctagagaagatatactccatagtgaagcaatctaattatgttttacgaattgagttggaagactggaaagacaacaaacattatattgaatattctttttacttgggaaatcacgaaaccaactatacgctacatctagttgcgattactggcaatgtccccaatgcaatcccggaaaacaaagatttggtgttttctacttgggatcacaaagcaaaaggacacttcaactgtccagagggttattcaggaggctggtggtggcatgatgagtgtggagaaaacaacctaaatggtaaatataacaaaccaagagcaaaatctaagccagagaggagaagaggattatcttggaagtctcaaaatggaaggttatactctataaaatcaaccaaaatgttgatccatccaacagattcagaaagctttgaatgaactgaggcaaatttaaaaggcaataatttaaacattaacctcattccaagttaatgtggtctaataatctggtattaaatccttaagagaaagcttgagaaatagattttttttatcttaaagtcactgtctatttaagattaaacatacaatcacataaccttaaagaataccgtttacatttctcaatcaaaattcttataatactatttgttttaaattttgtgatgtgggaatcaattttagatggtcacaatctagattataatcaataggtgaacttattaaataacttttctaaataaaaaatttagagacttttattttaaaaggcatcatatgagctaatatcacaactttcccagtttaaaaaactagtactcttgttaaaactctaaacttgactaaatacagaggactggtaattgtacagttcttaaatgttgtagtattaatttcaaaactaaaaatcgtcagcacagagtatgtgtaaaaatctgtaatacaaatttttaaactgatgcttcattttgctacaaaataatttggagtaaatgtttgatatgatttatttatgaaacctaatgaagcagaattaaatactgtattaaaataagttcgctgtctttaaacaaatggagatgactactaagtcacattgactttaacatgaggtatcactataccttatttgttaaaatatatactgtatacattttatatattttaacacttaatactatgaaaacaaataattgtaaaggaatcttgtcagattacagtaagaatgaacatatttgtggcatcgagttaaagtttatatttcccctaaatatgctgtgattctaatacattcgtgtaggttttcaagtagaaataaacctcgtaacaagttactgaacgtttaaacagcctgacaagcatgtatatatgtttaaaattcaataaacaaagacccagtccctaaattatagaaatttaaattattcttgcatgtttatcgacatcacaacagatccctaaatccctaaatccctaaagattagatacaaattttttaccacagtatcacttgtcagaatttatttttaaatatgattttttaaaactgccagtaagaaattttaaattaaacccatttgttaaaggatatagtgcccaagttatatggtgacctacctttgtcaatacttagcattatgtatttcaaattatccaatatacatgtcatatatatttttatatgtcacatatataaaagatatgtatgatctatgtgaatcctaagtaaatattttgttccagaaaagtacaaaataataaaggtaaaaataatctataattttcaggaccacagactaagctgtcgaaattaacgctgatttttttagggccagaataccaaaatggctcctctcttcccccaaaattggacaatttcaaatgcaaaataattcattatttaatatatgagttgcttcctctatt

SEQ ID NO: 1182 - protein, 460 aa, Homo sapiens
MFTIKLLLFIVPLVISSRIDQDNSSFDSLSPEPKSRFAMLDDVKILANGLLQLGHGLKDFVHKTKGQINDIFQKLNIFDQSFYDLSLQTSEIKEEEKELRRTTYKLQVKNEEVKNMSLELNSKLESLLEEKILLQQKVKYLEEQLTNLIQNQPETPEHPEVTSLKTFVEKQDNSIKDLLQTVEDQYKQLNQQHSQIKEIENQLRRTSIQEPTEISLSSKPRAPRTTPFLQLNEIRNVKHDGIPAECTTIYNRGEHTSGMYAIRPSNSQVFHVYCDVISGSPWTLIQHRIDGSQNFNETWENYKYGFGRLDGEFWLGLEKIYSIVKQSNYVLRIELEDWKDNKHYIEYSFYLGNHETNYTLHLVAITGNVPNAIPENKDLVFSTWDHKAKGHFNCPEGYSGGWWWHDECGENNLNGKYNKPRAKSKPERRRGLSWKSQNGRLYSIKSTKMLIHPTDSESFE

SEQ ID NO: 1183 - DNA, 2375 bp, Macaca fascicularis
tagagttaagaagtctaggtctgcttccagaagaacacagttccacgctgcttgaaattgaaaatcaggataaaaatgttcacaattaagctccttctttttattgttcctctagttatttcctccagaattgaccaagacaattcatcatttgattctgtatctccagagccaaaatcaagatttgctatgttagacgatgtaaaaattttagccaatggcctccttcagttgggacatggtcttaaagactttgtccataagactaagggccaaattaatgacatatttcaaaaactcaacatatttgatcagtctttttatgatctatcactgcaaaccagtgaaatcaaagaagaagaaaaggaactgagaagaactacatataaactacaagtcaaaaatgaagaggtaaagaatatgtcacttgaactcaactcaaaacttgaaagcctcctagaagaaaaaattctacttcaacaaaaagtgaaatatttagaagagcaactaactaacttaattcaaaatcaacctgcaactccagaacatccagaagtaacttcacttaaaagttttgtagaaaaacaagataatagcatcaaagaccttctccagactgtggaagaacaatataagcaattaaaccaacagcatagtcaaataaaagaaatagaaaatcagctcagaatgactaatattcaagaacccacagaaatttctctatcttccaagccaagagcaccaagaactactccctttcttcagctgaatgaaataagaaatgtaaaacatgatggcattcctgctgattgtaccaccatttacaatagaggtgaacatataagtggcacgtatgccatcagacccagcaactctcaagtttttcatgtctactgtgatgttgtatcaggtagtccatggacattaattcaacatcgaatagatggatcacaaaacttcaatgaaacgtgggagaactacaaatatggtttcgggaggcttgatggagaattctggttgggcctagagaagatatactccatagtgaagcaatctaattacgttttacgaattgagttggaagactggaaagacaacaaacattatattgaatattctttttacttgggaaatcacgaaaccaactatacgctacatgtagttaagattactggcaatgtccccaatgcaatcccggaaaacaaagatttggtgttttctacttgggatcacaaagcaaaaggacacttcagctgtccagagagttattcaggaggctggtggtggcatgatgagtgtggagaaaacaacctaaatggtaaatataacaaaccaagaacaaaatctaagccagagcggagaagaggattatcctggaagtctcaaaatggaaggttatactctataaaatcaaccaaaatgttgatccatccaacagattcagaaagctttgaatgaactgaggcaaatttaaaaggcaataaattaaacattaaactcattccaagttaatgtggtttaataatctggtattaaatccttaagagaaggcttgagaaatagatttttttatcttaaagtcactgtcaatttaagattaaacatacaatcacataaccttaaagaataccatttacatttctcaatcaaaattcttacaacactatttgttttatattttgtgatgtgggaatcaattttagatggtcgcaatctaaattataatcaacaggtgaacttactaaataacttttctaaataaaaaacttagagactttaattttaaaagtcatcatatgagctaatatcacaattttcccagtttaaaaaactagttttcttgttaaaactctaaacttgactaaataaagaggactgataattatacagttcttaaatttgttgtaatattaatttcaaaactaaaaattgtcagcacagagtatgtgtaaaaatctgtaatataaatttttaaactgatgcctcattttgctacaaaataatctggagtaaatttttgataggatttatttatgaaacctaatgaagcaggattaaatactgtattaaaataggttcgctgtcttttaaacaaatggagatgatgattactaagtcacattgactttaatatgaggtatcactataccttaacatatttgttaaaacgtatactgtatacattttgtgtattttaatacttaatactatgaaaacaagtaattgtaaacgtatcttgtcagattacaataggaatgaacatattggtgacatcgagttaaagtttatatttcccctaaatatgctgcgattccaatatattcatgtaggttttcaagcagaaataaaccttgtaacaagttactgactaaaca

SEQ ID NO: 1184 - protein, 460 aa, Macaca fascicularis
MFTIKLLLFIVPLVISSRIDQDNSSFDSVSPEPKSRFAMLDDVKILANGLLQLGHGLKDFVHKTKGQINDIFQKLNIFDQSFYDLSLQTSEIKEEEKELRRTTYKLQVKNEEVKNMSLELNSKLESLLEEKILLQQKVKYLEEQLTNLIQNQPATPEHPEVTSLKSFVEKQDNSIKDLLQTVEEQYKQLNQQHSQIKEIENQLRMTNIQEPTEISLSSKPRAPRTTPFLQLNEIRNVKHDGIPADCTTIYNRGEHISGTYAIRPSNSQVFHVYCDVVSGSPWTLIQHRIDGSQNFNETWENYKYGFGRLDGEFWLGLEKIYSIVKQSNYVLRIELEDWKDNKHYIEYSFYLGNHETNYTLHVVKITGNVPNAIPENKDLVFSTWDHKAKGHFSCPESYSGGWWWHDECGENNLNGKYNKPRTKSKPERRRGLSWKSQNGRLYSIKSTKMLIHPTDSESFE

SEQ ID NO: 1185 - DNA, 16 bp, Artificial Sequence
  Description of Artificial Sequence: Synthetic oligonucleotide
  modified_base 1..16: /mod_base="OTHER" /note="dT"
tttttttttttttttt
